(19) United States
(12) Patent Application Publication
(10) Pub. No.: US 2021/0292383 A1
(43) Pub. Date: Sep. 23, 2021

(54) ALLERGY ANTIGEN AND EPITOPE THEREOF

(71) Applicant: HOYU CO., LTD., Nagoya-shi, Aichi (JP)

(72) Inventors: Kayoko MATSUNAGA, Toyoake-shi, Aichi (JP); Akiko YAGAMI, Toyoake-shi, Aichi (JP); Naoshi SHIMOJO, Nagakute-shi, Aichi (JP); Fumiaki OHNO, Nagakute-shi, Aichi (JP)

(21) Appl. No.: 16/490,092

(22) PCT Filed: Sep. 5, 2017
(86) PCT No.: PCT/JP2017/032005

§ 371 Date: Aug. 30, 2019

(30) Foreign Application Priority Data
Mar. 3, 2017 (JP) PCT/JP2017/008593

(51) Int. Cl. C07K 14/47; A23L 11/30; G01N 33/53

(52) U.S. Cl. CPC C07K 14/47; A23L 11/30; A61K 38/00; G01N 2800/24; G01N 33/53

(57) ABSTRACT

The present invention provides novel antigens of an allergy to soybean, methods and kits for diagnosing an allergy to soybean, pharmaceutical compositions comprising such an antigen, soybeans or processed products of soybean in which such an antigen is eliminated, and a tester for determining the presence or absence of a soybean antigen in an object of interest. The present invention also relates to polypeptides comprising an epitope of an allergen, kits, compositions and methods for diagnosing an allergy, comprising such a polypeptide, pharmaceutical compositions comprising such a polypeptide, and food raw materials or edible processed products in which an antigen comprising such a polypeptide is eliminated or reduced, or the polypeptide is cleaved or removed. The present invention further relates to a tester for determining the presence or absence of an antigen in an object of interest.

### TECHNICAL FIELD

[0001] The present invention relates to a novel antigen of an allergy to soybean. The present invention also relates to a kit, a composition, and a method for diagnosing allergy to soybean. The present invention also relates to a pharmaceutical composition comprising such an antigen and soybean or processed products of soybean in which such an antigen is eliminated or reduced. The present invention further relates to a tester for determining the presence or absence of a soybean antigen in an object of interest.

[0002] The present invention also relates to a polypeptide comprising an epitope of an allergen. The present invention also relates to a kit, a composition and a method for diagnosing an allergy, comprising such a polypeptide. The present invention also relates to a pharmaceutical composition comprising such a polypeptide, and a food raw material or an edible processed product in which an antigen comprising such a polypeptide is eliminated or reduced, or such a polypeptide is cleaved or removed. The present invention further relates to a method for producing an edible processed product in which such an antigen is eliminated or reduced. The present invention further relates to a tester for determining the presence or absence of an antigen comprising such a polypeptide in an object of interest.

### BACKGROUND ART

[0003] In blood and tissues of allergic patients, IgE antibodies specific to particular antigens are produced. Physiological consequences caused by interaction between such IgE antibodies and such particular antigens elicit allergic reactions.

[0004] In the process of production of conventional allergy testing agents, antigen reagents are commonly prepared simply by grinding a candidate allergenic food, material or the like (Patent Literature 1). As seen above, conventional antigen reagents do not necessarily contain only a particular antigenic protein inducing an allergic reaction (allergen component), and rather contain different types of protein components. Thus, conventional antigen reagents contain varied amounts of allergen components. For this reason, the only case where conventional allergy tests have permitted detection of a positive allergic reaction is when in a conventional antigen reagent containing many types of proteins, a particular protein acting as an allergen component is present in an amount exceeding a threshold that allows determination of a positive reaction for binding to an IgE antibody. However, no determination of a positive reaction was possible and diagnosis efficiency was not sufficiently high when using a conventional allergy testing agent in patients possessing an IgE antibody binding to an allergen component present in small amounts in an allergen such as food.

[0005] The severity and symptoms of an allergic reaction do not necessarily correlate with the content of an allergen component. Even when a patient's IgE antibody reacts with an allergen component present in trace amounts in a candidate allergic food and material, the allergic reaction may develop allergic symptoms or may affect the severity of those symptoms.

[0006] An attempt to increase the diagnostic efficiency is being made by examining IgE antibodies to components composing a crude antigen to distinguish sensitization that directly contributes to a diagnosis from sensitization based on cross-antigenicity by a pan-allergen or the like. 8 soybean allergens are currently registered to the World Health Organization/International Union of Immunological Societies (WHO/IUIS).

[0007] However, while it is necessary to exhaustively identify allergen components in candidate allergic foods and materials in order to enhance the reliability of allergy tests, the patient detection rate by the measurement of such allergenic components is far from sufficient. Identification of novel allergens in soybean is very important not only for increasing the precision of diagnosis, but also for determining targets of therapeutic agents and low allergenic foods.

[0008] Meanwhile, in the field of protein separation and purification, various efforts have conventionally been made to develop methods for separating and purifying a protein or nucleic acid of interest from cell extracts or the like. Such methods may well be exemplified by dialysis based on salt concentration, and centrifugal separation.

[0009] Other efforts have been made to develop many purification methods based on electric charges of protein or nucleic acid residues or on the difference in molecular weight. Electric charge-based purification methods can be exemplified by column chromatography using ion exchange resins, and isoelectric focusing. Purifications based on molecular weight difference can be exemplified by centrifugal separation, molecular-sieve column chromatography, and SDS-PAGE (sodium dodecyl sulfate-polyacrylamide gel electrophoresis).

[0010] In recent years, a method for separating and purifying many different proteins from a small amount of sample has been used, which is more specifically a two-dimensional electrophoresis consisting of isoelectric focusing in the first dimension, followed by SDS-PAGE in the second dimension. The present applicant has conventionally developed some 2D electrophoresis methods with high separation ability (Patent Literature 2-5).

[0011] Allergen-specific IgE antibodies recognize and bind to epitopes that are particular amino acid sequences in allergen components. However, only a slight number of analyses have been made on epitopes as to the allergen components (Non Patent Literature 1), but such analyses are still totally quite rare. Furthermore, any kit for diagnosing an allergy using a polypeptide comprising an epitope has not yet emerged in the market.

### CITATION LIST

### Patent Literature

[0012] PTL1: Japanese Patent Application Publication No. JP 2002-286716

[0013] PTL2: Japanese Patent Application Publication No. JP 2011-33544

[0014] PTL3: Japanese Patent Application Publication No. JP 2011-33546

[0015] PTL4: Japanese Patent Application Publication No. JP 2011-33547

[0016] PTL5: Japanese Patent Application Publication No. JP 2011-33548

### Non Patent Literature

[0017] NPL 1: Matsuo, H., et al., J. Biol. Chem., (2004), Vol. 279, No. 13, pp. 12135-12140

[0018] NPL 2: Zhao, L., et al., PLoS One. 2017 Aug. 11; 12(8):e0182935. doi: 10.1371/journal.pone.0182935. eCollection 2017.

[0019] NPL 3: Cong, Y., et al., J Dairy Sci. 2013; 96(11):6870-6. doi: 10.3168/jds.2013-6880. Epub 2013 Sep. 12.

[0020] NPL 4: Beezhold, D. H., et al., J Allergy Clin Immunol. 2001 June; 107(6):1069-76.

### SUMMARY OF INVENTION

### Technical Problem

[0021] The present invention provides novel antigens of an allergy to soybean. The present invention also provides methods and kits for diagnosing allergy to soybean. The present invention also provides pharmaceutical compositions comprising such an antigen and soybean or processed products of soybean in which such an antigen is eliminated or reduced. The present invention further provides testers for determining the presence or absence of a soybean antigen in an object of interest.

[0022] The present invention also provides polypeptides comprising an epitope of an allergen. The present invention also provides kits, compositions and methods for diagnosing an allergy. The present invention also provides pharmaceutical compositions comprising such a polypeptide, and food raw materials or edible processed products in which an antigen comprising such a polypeptide is eliminated or reduced, or such a polypeptide is cleaved or removed. The present invention further relates to methods for producing an edible processed product in which such an antigen is eliminated or reduced. The present invention further relates to testers for determining the presence or absence of an antigen comprising such a polypeptide in an object of interest.

### Solution to Problem

[0023] In order to solve the aforementioned problems, the present inventors had made intensive studies to identify causative antigens of an allergy. As a result, the inventors succeeded in identifying novel antigens to which an IgE antibody in the serum of an allergic patient specifically binds. The present invention has been completed based on this finding.

[0024] Thus, in one embodiment, the present invention can be as defined below.

[0025] [1] A kit for diagnosing an allergy to a soybean, the kit comprising, as an antigen, at least one of proteins defined below in any one of (1α) to (55α):
[0026] (1α) (1αA1) endoplasmin homolog isoform X2 or a variant thereof, which is defined below in any of (1αA1-a) to (1αA1-e):

[0027] (1αA1-a) a protein comprising an amino acid sequence with deletion, substitution, insertion or addition of one or several amino acids in SEQ ID NO: 70;

[0028] (1αA1-b) a protein comprising an amino acid sequence having at least 70% identity to the amino acid sequence of SEQ ID NO: 70;

[0029] (1αA1-c) a protein comprising an amino acid sequence encoded by a nucleotide sequence with deletion, substitution, insertion or addition of one or several nucleotides in SEQ ID NO: 69;

[0030] (1αA1-d) a protein comprising an amino acid sequence encoded by a nucleotide sequence having at least 70% identity to the nucleotide sequence of SEQ ID NO: 69; or

[0031] (1αA1-e) a protein comprising an amino acid sequence encoded by a nucleic acid that hybridizes under stringent conditions with a nucleic acid having a nucleotide sequence complementary to the nucleotide sequence of SEQ ID NO: 69;

[0032] (1αB1) a protein comprising at least one amino acid sequence selected from the group consisting of SEQ ID NOs: 71-87,

[0033] (1αA2) endoplasmin homolog isoform X2 or a variant thereof, which is defined below in any of (1αA2-a) to (1αA2-e):

[0034] (1αA2-a) a protein comprising an amino acid sequence with deletion, substitution, insertion or addition of one or several amino acids in SEQ ID NO: 89;

[0035] (1αA2-b) a protein comprising an amino acid sequence having at least 70% identity to the amino acid sequence of SEQ ID NO: 89;

[0036] (1αA2-c) a protein comprising an amino acid sequence encoded by a nucleotide sequence with deletion, substitution, insertion or addition of one or several nucleotides in SEQ ID NO: 88;

[0037] (1αA2-d) a protein comprising an amino acid sequence encoded by a nucleotide sequence having at least 70% identity to the nucleotide sequence of SEQ ID NO: 88; or

[0038] (1αA2-e) a protein comprising an amino acid sequence encoded by a nucleic acid that hybridizes under stringent conditions with a nucleic acid having a nucleotide sequence complementary to the nucleotide sequence of SEQ ID NO: 88; or

[0039] (1αB2) a protein comprising at least one amino acid sequence selected from the group consisting of SEQ ID NOs: 90-104;
[0040] (2α) (2αA1) heat shock cognate protein 80 or a variant thereof, which is defined below in any of (2αA1-a) to (2αA1-e):

[0041] (2αA1-a) a protein comprising an amino acid sequence with deletion, substitution, insertion or addition of one or several amino acids in SEQ ID NO: 106;

[0042] (2αA1-b) a protein comprising an amino acid sequence having at least 70% identity to the amino acid sequence of SEQ ID NO: 106;

[0043] (2αA1-c) a protein comprising an amino acid sequence encoded by a nucleotide sequence with deletion, substitution, insertion or addition of one or several nucleotides in SEQ ID NO: 105;

[0044] (2αA1-d) a protein comprising an amino acid sequence encoded by a nucleotide sequence having at least 70% identity to the nucleotide sequence of SEQ ID NO: 105; or

[0045] (2αA1-e) a protein comprising an amino acid sequence encoded by a nucleic acid that hybridizes under stringent conditions with a nucleic acid having a nucleotide sequence complementary to the nucleotide sequence of SEQ ID NO: 105; or

[0046] (2αB1) a protein comprising at least one amino acid sequence selected from the group consisting of SEQ ID NOs: 107-120;

[0047] (2αA2) heat shock protein 90-1 or a variant thereof, which is defined below in any of (2αA2-a) to (2αA2-e):

[0048] (2αA2-a) a protein comprising an amino acid sequence with deletion, substitution, insertion or addition of one or several amino acids in SEQ ID NO: 122;

[0049] (2αA2-b) a protein comprising an amino acid sequence having at least 70% identity to the amino acid sequence of SEQ ID NO: 122;

[0050] (2αA2-c) a protein comprising an amino acid sequence encoded by a nucleotide sequence with deletion, substitution, insertion or addition of one or several nucleotides in SEQ ID NO: 121;

[0051] (2αA2-d) a protein comprising an amino acid sequence encoded by a nucleotide sequence having at least 70% identity to the nucleotide sequence of SEQ ID NO: 121; or

[0052] (2αA2-e) a protein comprising an amino acid sequence encoded by a nucleic acid that hybridizes under stringent conditions with a nucleic acid having a nucleotide sequence complementary to the nucleotide sequence of SEQ ID NO: 121; or

[0053] (2αB2) a protein comprising at least one amino acid sequence selected from the group consisting of SEQ ID NOs: 123-137;

[0054] (2αA3) hypothetical protein GLYMA_02G302500 or a variant thereof, which is defined below in any of (2αA3-a) to (2αA3-e):

[0055] (2αA3-a) a protein comprising an amino acid sequence with deletion, substitution, insertion or addition of one or several amino acids in SEQ ID NO: 139;

[0056] (2αA3-b) a protein comprising an amino acid sequence having at least 70% identity to the amino acid sequence of SEQ ID NO: 139;

[0057] (2αA3-c) a protein comprising an amino acid sequence encoded by a nucleotide sequence with deletion, substitution, insertion or addition of one or several nucleotides in SEQ ID NO: 138;

[0058] (2αA3-d) a protein comprising an amino acid sequence encoded by a nucleotide sequence having at least 70% identity to the nucleotide sequence of SEQ ID NO: 138; or

[0059] (2αA3-e) a protein comprising an amino acid sequence encoded by a nucleic acid that hybridizes under stringent conditions with a nucleic acid having a nucleotide sequence complementary to the nucleotide sequence of SEQ ID NO: 138; or

[0060] (2αB3) a protein comprising at least one amino acid sequence selected from the group consisting of SEQ ID NOs: 140-153;
[0061] (4α) (4αA) embryo-specific urease isoform X1 or a variant thereof, which is defined below in any of (4αA-a) to (4αA-e):

[0062] (4αA-a) a protein comprising an amino acid sequence with deletion, substitution, insertion or addition of one or several amino acids in SEQ ID NO: 155;

[0063] (4αA-b) a protein comprising an amino acid sequence having at least 70% identity to the amino acid sequence of SEQ ID NO: 155;

[0064] (4αA-c) a protein comprising an amino acid sequence encoded by a nucleotide sequence with deletion, substitution, insertion or addition of one or several nucleotides in SEQ ID NO: 154;

[0065] (4αA-d) a protein comprising an amino acid sequence encoded by a nucleotide sequence having at least 70% identity to the nucleotide sequence of SEQ ID NO: 154; or

[0066] (4αA-e) a protein comprising an amino acid sequence encoded by a nucleic acid that hybridizes under stringent conditions with a nucleic acid having a nucleotide sequence complementary to the nucleotide sequence of SEQ ID NO: 154; or

[0067] (4αB) a protein comprising at least one amino acid sequence selected from the group consisting of SEQ ID NOs: 156 and 157;
[0068] (5α) (5αA) alpha-1,4 glucan phosphorylase L isozyme, chloroplastic/amyloplastic or a variant thereof, which is defined below in any of (5αA-a) to (5αA-e):

[0069] (5αA-a) a protein comprising an amino acid sequence with deletion, substitution, insertion or addition of one or several amino acids in SEQ ID NO: 159;

[0070] (5αA-b) a protein comprising an amino acid sequence having at least 70% identity to the amino acid sequence of SEQ ID NO: 159;

[0071] (5αA-c) a protein comprising an amino acid sequence encoded by a nucleotide sequence with deletion, substitution, insertion or addition of one or several nucleotides in SEQ ID NO: 158;

[0072] (5αA-d) a protein comprising an amino acid sequence encoded by a nucleotide sequence having at least 70% identity to the nucleotide sequence of SEQ ID NO: 158; or

[0073] (5αA-e) a protein comprising an amino acid sequence encoded by a nucleic acid that hybridizes under stringent conditions with a nucleic acid having a nucleotide sequence complementary to the nucleotide sequence of SEQ ID NO: 158; or

[0074] (5αB) a protein comprising at least one amino acid sequence selected from the group consisting of SEQ ID NOs: 160 and 161;
[0075] (6α) (6αA1) aconitate hydratase 1 or a variant thereof, which is defined below in any of (6αA1-a) to (6αA1-e):

[0076] (6αA1-a) a protein comprising an amino acid sequence with deletion, substitution, insertion or addition of one or several amino acids in SEQ ID NO: 163;

[0077] (6αA1-b) a protein comprising an amino acid sequence having at least 70% identity to the amino acid sequence of SEQ ID NO: 163;

[0078] (6αA1-c) a protein comprising an amino acid sequence encoded by a nucleotide sequence with deletion, substitution, insertion or addition of one or several nucleotides in SEQ ID NO: 162;

[0079] (6αA1-d) a protein comprising an amino acid sequence encoded by a nucleotide sequence having at least 70% identity to the nucleotide sequence of SEQ ID NO: 162; or

[0080] (6αA1-e) a protein comprising an amino acid sequence encoded by a nucleic acid that hybridizes under stringent conditions with a nucleic acid having a nucleotide sequence complementary to the nucleotide sequence of SEQ ID NO: 162;

[0081] (6αB1) a protein comprising at least one amino acid sequence selected from the group consisting of SEQ ID NOs: 164-167; or

[0082] (6αA2) aconitate hydratase 1 or a variant thereof, which is defined below in any of (6αA2-a) to (6αA2-e):

[0083] (6αA2-a) a protein comprising an amino acid sequence with deletion, substitution, insertion or addition of one or several amino acids in SEQ ID NO: 169;

[0084] (6αA2-b) a protein comprising an amino acid sequence having at least 70% identity to the amino acid sequence of SEQ ID NO: 169;

[0085] (6αA2-c) a protein comprising an amino acid sequence encoded by a nucleotide sequence with deletion, substitution, insertion or addition of one or several nucleotides in SEQ ID NO: 168;

[0086] (6αA2-d) a protein comprising an amino acid sequence encoded by a nucleotide sequence having at least 70% identity to the nucleotide sequence of SEQ ID NO: 168; or

[0087] (6αA2-e) a protein comprising an amino acid sequence encoded by a nucleic acid that hybridizes under stringent conditions with a nucleic acid having a nucleotide sequence complementary to the nucleotide sequence of SEQ ID NO: 168; or

[0088] (6αB2) a protein comprising at least one amino acid sequence selected from the group consisting of SEQ ID NOs: 170-172;
[0089] (7α) (7αA) methionine synthase or a variant thereof, which is defined below in any of (7αA-a) to (7αA-e):

[0090] (7αA-a) a protein comprising an amino acid sequence with deletion, substitution, insertion or addition of one or several amino acids in SEQ ID NO: 174;

[0091] (7αA-b) a protein comprising an amino acid sequence having at least 70% identity to the amino acid sequence of SEQ ID NO: 174;

[0092] (7αA-c) a protein comprising an amino acid sequence encoded by a nucleotide sequence with deletion, substitution, insertion or addition of one or several nucleotides in SEQ ID NO: 173;

[0093] (7αA-d) a protein comprising an amino acid sequence encoded by a nucleotide sequence having at least 70% identity to the nucleotide sequence of SEQ ID NO: 173; or

[0094] (7αA-e) a protein comprising an amino acid sequence encoded by a nucleic acid that hybridizes under stringent conditions with a nucleic acid having a nucleotide sequence complementary to the nucleotide sequence of SEQ ID NO: 173; or

[0095] (7αB) a protein comprising at least one amino acid sequence selected from the group consisting of SEQ ID NOs: 175-187;

[0096] (8α) (8αA) transketolase, chloroplastic or a variant thereof, which is defined below in any of (8αA-a) to (8αA-e):

[0097] (8αA-a) a protein comprising an amino acid sequence with deletion, substitution, insertion or addition of one or several amino acids in SEQ ID NO: 189;

[0098] (8αA-b) a protein comprising an amino acid sequence having at least 70% identity to the amino acid sequence of SEQ ID NO: 189;

[0099] (8αA-c) a protein comprising an amino acid sequence encoded by a nucleotide sequence with deletion, substitution, insertion or addition of one or several nucleotides in SEQ ID NO: 188;

[0100] (8αA-d) a protein comprising an amino acid sequence encoded by a nucleotide sequence having at least 70% identity to the nucleotide sequence of SEQ ID NO: 188; or

[0101] (8αA-e) a protein comprising an amino acid sequence encoded by a nucleic acid that hybridizes under stringent conditions with a nucleic acid having a nucleotide sequence complementary to the nucleotide sequence of SEQ ID NO: 188; or

[0102] (8αB) a protein comprising at least one amino acid sequence selected from the group consisting of SEQ ID NOs: 190-199;
[0103] (9α) (9αA) lysine-tRNA ligase, cytoplasmic-like isoform X2 or a variant thereof, which is defined below in any of (9αA-a) to (9αA-e):

[0104] (9αA-a) a protein comprising an amino acid sequence with deletion, substitution, insertion or addition of one or several amino acids in SEQ ID NO: 201;

[0105] (9αA-b) a protein comprising an amino acid sequence having at least 70% identity to the amino acid sequence of SEQ ID NO: 201;

[0106] (9αA-c) a protein comprising an amino acid sequence encoded by a nucleotide sequence with deletion, substitution, insertion or addition of one or several nucleotides in SEQ ID NO: 200;

[0107] (9αA-d) a protein comprising an amino acid sequence encoded by a nucleotide sequence having at least 70% identity to the nucleotide sequence of SEQ ID NO: 200; or

[0108] (9αA-e) a protein comprising an amino acid sequence encoded by a nucleic acid that hybridizes under stringent conditions with a nucleic acid having a nucleotide sequence complementary to the nucleotide sequence of SEQ ID NO: 200; or

[0109] (9αB) a protein comprising an amino acid sequence of SEQ ID NO: 202;
[0110] (10α) (10αA1) chaperonin CPN60-2, mitochondrial or a variant thereof, which is defined below in any of (10αA1-a) to (10αA1-e):

[0111] (10αA1-a) a protein comprising an amino acid sequence with deletion, substitution, insertion or addition of one or several amino acids in SEQ ID NO: 204;

[0112] (10αA1-b) a protein comprising an amino acid sequence having at least 70% identity to the amino acid sequence of SEQ ID NO: 204;

[0113] (10αA1-c) a protein comprising an amino acid sequence encoded by a nucleotide sequence with deletion, substitution, insertion or addition of one or several nucleotides in SEQ ID NO: 203;

[0114] (10αA1-d) a protein comprising an amino acid sequence encoded by a nucleotide sequence having at least 70% identity to the nucleotide sequence of SEQ ID NO: 203; or

[0115] (10αA1-e) a protein comprising an amino acid sequence encoded by a nucleic acid that hybridizes under stringent conditions with a nucleic acid having a nucleotide sequence complementary to the nucleotide sequence of SEQ ID NO: 203;

[0116] (10αB 1) a protein comprising at least one amino acid sequence selected from the group consisting of SEQ ID NOs: 205-218;

[0117] (10αA2) chaperonin CPN60-2, mitochondrial-like isoform X1 or a variant thereof, which is defined below in any of (10αA2-a) to (10αA2-e):

[0118] (10αA2-a) a protein comprising an amino acid sequence with deletion, substitution, insertion or addition of one or several amino acids in SEQ ID NO: 220;

[0119] (10αA2-b) a protein comprising an amino acid sequence having at least 70% identity to the amino acid sequence of SEQ ID NO: 220;

[0120] (10αA2-c) a protein comprising an amino acid sequence encoded by a nucleotide sequence with deletion, substitution, insertion or addition of one or several nucleotides in SEQ ID NO: 219;

[0121] (10αA2-d) a protein comprising an amino acid sequence encoded by a nucleotide sequence having at least 70% identity to the nucleotide sequence of SEQ ID NO: 219; or

[0122] (10αA2-e) a protein comprising an amino acid sequence encoded by a nucleic acid that hybridizes under stringent conditions with a nucleic acid having a nucleotide sequence complementary to the nucleotide sequence of SEQ ID NO: 219; or

[0123] (10αB2) a protein comprising at least one amino acid sequence selected from the group consisting of SEQ ID NOs: 221-231;
[0124] (11α) (11αA) polyadenylate-binding protein 8 isoform X3 or a variant thereof, which is defined below in any of (11αA-a) to (11αA-e):

[0125] (11αA-a) a protein comprising an amino acid sequence with deletion, substitution, insertion or addition of one or several amino acids in SEQ ID NO: 233;

[0126] (11αA-b) a protein comprising an amino acid sequence having at least 70% identity to the amino acid sequence of SEQ ID NO: 233;

[0127] (11αA-c) a protein comprising an amino acid sequence encoded by a nucleotide sequence with deletion, substitution, insertion or addition of one or several nucleotides in SEQ ID NO: 232;

[0128] (11αA-d) a protein comprising an amino acid sequence encoded by a nucleotide sequence having at least 70% identity to the nucleotide sequence of SEQ ID NO: 232; or

[0129] (11αA-e) a protein comprising an amino acid sequence encoded by a nucleic acid that hybridizes under stringent conditions with a nucleic acid having a nucleotide sequence complementary to the nucleotide sequence of SEQ ID NO: 232; or

[0130] (11αB) a protein comprising at least one amino acid sequence selected from the group consisting of SEQ ID NOs: 234-237;
[0131] (12α) (12αA) pyrophosphate-fructose 6-phosphate 1-phosphotransferase subunit alpha-like or a variant thereof, which is defined below in any of (12αA-a) to (12αA-e):

[0132] (12αA-a) a protein comprising an amino acid sequence with deletion, substitution, insertion or addition of one or several amino acids in SEQ ID NO: 239;

[0133] (12αA-b) a protein comprising an amino acid sequence having at least 70% identity to the amino acid sequence of SEQ ID NO: 239;

[0134] (12αA-c) a protein comprising an amino acid sequence encoded by a nucleotide sequence with deletion, substitution, insertion or addition of one or several nucleotides in SEQ ID NO: 238;

[0135] (12αA-d) a protein comprising an amino acid sequence encoded by a nucleotide sequence having at least 70% identity to the nucleotide sequence of SEQ ID NO: 238; or

[0136] (12αA-e) a protein comprising an amino acid sequence encoded by a nucleic acid that hybridizes under stringent conditions with a nucleic acid having a nucleotide sequence complementary to the nucleotide sequence of SEQ ID NO: 238; or

[0137] (12αB) a protein comprising an amino acid sequence of SEQ ID NO: 240;
[0138] (13α) (13αA1) protein disulfide isomerase-like protein precursor or a variant thereof, which is defined below in any of (13αA1-a) to (13αA1-e):

[0139] (13αA1-a) a protein comprising an amino acid sequence with deletion, substitution, insertion or addition of one or several amino acids in SEQ ID NO: 242;

[0140] (13αA1-b) a protein comprising an amino acid sequence having at least 70% identity to the amino acid sequence of SEQ ID NO: 242;

[0141] (13αA1-c) a protein comprising an amino acid sequence encoded by a nucleotide sequence with deletion, substitution, insertion or addition of one or several nucleotides in SEQ ID NO: 241;

[0142] (13 αA1-d) a protein comprising an amino acid sequence encoded by a nucleotide sequence having at least 70% identity to the nucleotide sequence of SEQ ID NO: 241; or

[0143] (13αA1-e) a protein comprising an amino acid sequence encoded by a nucleic acid that hybridizes under stringent conditions with a nucleic acid having a nucleotide sequence complementary to the nucleotide sequence of SEQ ID NO: 241;

[0144] (13 αB 1) a protein comprising at least one amino acid sequence selected from the group consisting of SEQ ID NOs: 243-252;

[0145] (13αA2) protein disulfide-isomerase or a variant thereof, which is defined below in any of (13αA2-a) to (13αA2-e):

[0146] (13αA2-a) a protein comprising an amino acid sequence with deletion, substitution, insertion or addition of one or several amino acids in SEQ ID NO: 254;

[0147] (13αA2-b) a protein comprising an amino acid sequence having at least 70% identity to the amino acid sequence of SEQ ID NO: 254;

[0148] (13αA2-c) a protein comprising an amino acid sequence encoded by a nucleotide sequence with deletion, substitution, insertion or addition of one or several nucleotides in SEQ ID NO: 253;

[0149] (13αA2-d) a protein comprising an amino acid sequence encoded by a nucleotide sequence having at least 70% identity to the nucleotide sequence of SEQ ID NO: 253; or

[0150] (13αA2-e) a protein comprising an amino acid sequence encoded by a nucleic acid that hybridizes under stringent conditions with a nucleic acid having a nucleotide sequence complementary to the nucleotide sequence of SEQ ID NO: 253; or

[0151] (13αB2) a protein comprising at least one amino acid sequence selected from the group consisting of SEQ ID NOs: 255-278;
[0152] (14α) (14αA1) V-type proton ATPase subunit B 2 or a variant thereof, which is defined below in any of (14αA1-a) to (14αA1-e):

[0153] (14αA1-a) a protein comprising an amino acid sequence with deletion, substitution, insertion or addition of one or several amino acids in SEQ ID NO: 280;

[0154] (14αA1-b) a protein comprising an amino acid sequence having at least 70% identity to the amino acid sequence of SEQ ID NO: 280;

[0155] (14αA1-c) a protein comprising an amino acid sequence encoded by a nucleotide sequence with deletion, substitution, insertion or addition of one or several nucleotides in SEQ ID NO: 279;

[0156] (14αA1-d) a protein comprising an amino acid sequence encoded by a nucleotide sequence having at least 70% identity to the nucleotide sequence of SEQ ID NO: 279; or

[0157] (14αA1-e) a protein comprising an amino acid sequence encoded by a nucleic acid that hybridizes under stringent conditions with a nucleic acid having a nucleotide sequence complementary to the nucleotide sequence of SEQ ID NO: 279;

[0158] (14αB1) a protein comprising at least one amino acid sequence selected from the group consisting of SEQ ID NOs: 281-284;

[0159] (14αA2) V-type proton ATPase subunit B 2 or a variant thereof, which is defined below in any of (14αA2-a) to (14αA2-e):

[0160] (14αA2-a) a protein comprising an amino acid sequence with deletion, substitution, insertion or addition of one or several amino acids in SEQ ID NO: 286;

[0161] (14αA2-b) a protein comprising an amino acid sequence having at least 70% identity to the amino acid sequence of SEQ ID NO: 286;

[0162] (14αA2-c) a protein comprising an amino acid sequence encoded by a nucleotide sequence with deletion, substitution, insertion or addition of one or several nucleotides in SEQ ID NO: 285;

[0163] (14αA2-d) a protein comprising an amino acid sequence encoded by a nucleotide sequence having at least 70% identity to the nucleotide sequence of SEQ ID NO: 285; or

[0164] (14αA2-e) a protein comprising an amino acid sequence encoded by a nucleic acid that hybridizes under stringent conditions with a nucleic acid having a nucleotide sequence complementary to the nucleotide sequence of SEQ ID NO: 285; or

[0165] (14αB2) a protein comprising at least one amino acid sequence selected from the group consisting of SEQ ID NOs: 287-289;
[0166] (15, 16α) (15, 16αA1) UTP-glucose-1-phosphate uridylyltransferase or a variant thereof, which is defined below in any of (15, 16αA1-a) to (15, 16αA1-e):

[0167] (15, 16αA1-a) a protein comprising an amino acid sequence with deletion, substitution, insertion or addition of one or several amino acids in SEQ ID NO: 291;

[0168] (15, 16αA1-b) a protein comprising an amino acid sequence having at least 70% identity to the amino acid sequence of SEQ ID NO: 291;

[0169] (15, 16αA1-c) a protein comprising an amino acid sequence encoded by a nucleotide sequence with deletion, substitution, insertion or addition of one or several nucleotides in SEQ ID NO: 290;

[0170] (15, 16αA1-d) a protein comprising an amino acid sequence encoded by a nucleotide sequence having at least 70% identity to the nucleotide sequence of SEQ ID NO: 290; or

[0171] (15, 16αA1-e) a protein comprising an amino acid sequence encoded by a nucleic acid that hybridizes under stringent conditions with a nucleic acid having a nucleotide sequence complementary to the nucleotide sequence of SEQ ID NO: 290;

[0172] (15, 16αB1) a protein comprising at least one amino acid sequence selected from the group consisting of SEQ ID NOs: 292-304;

[0173] (15, 16αA2) hypothetical protein GLYMA02G241100 or a variant thereof, which is defined below in any of (15, 16αA2-a) to (15, 16αA2-e):

[0174] (15, 16αA2-a) a protein comprising an amino acid sequence with deletion, substitution, insertion or addition of one or several amino acids in SEQ ID NO: 306;

[0175] (15, 16αA2-b) a protein comprising an amino acid sequence having at least 70% identity to the amino acid sequence of SEQ ID NO: 306;

[0176] (15, 16αA2-c) a protein comprising an amino acid sequence encoded by a nucleotide sequence with deletion, substitution, insertion or addition of one or several nucleotides in SEQ ID NO: 305;

[0177] (15, 16αA2-d) a protein comprising an amino acid sequence encoded by a nucleotide sequence having at least 70% identity to the nucleotide sequence of SEQ ID NO: 305; or

[0178] (15, 16αA2-e) a protein comprising an amino acid sequence encoded by a nucleic acid that hybridizes under stringent conditions with a nucleic acid having a nucleotide sequence complementary to the nucleotide sequence of SEQ ID NO: 305; or

[0179] (15, 16αB2) a protein comprising at least one amino acid sequence selected from the group consisting of SEQ ID NOs: 307-318;
[0180] (17α) (17αA1) guanosine nucleotide diphosphate dissociation inhibitor 2 or a variant thereof, which is defined below in any of (17αA1-a) to (17αA1-e):

[0181] (17αA 1-a) a protein comprising an amino acid sequence with deletion, substitution, insertion or addition of one or several amino acids in SEQ ID NO: 320;

[0182] (17αA1-b) a protein comprising an amino acid sequence having at least 70% identity to the amino acid sequence of SEQ ID NO: 320;

[0183] (17αA1-c) a protein comprising an amino acid sequence encoded by a nucleotide sequence with deletion, substitution, insertion or addition of one or several nucleotides in SEQ ID NO: 319;

[0184] (17αA1-d) a protein comprising an amino acid sequence encoded by a nucleotide sequence having at least 70% identity to the nucleotide sequence of SEQ ID NO: 319; or

[0185] (17αA1-e) a protein comprising an amino acid sequence encoded by a nucleic acid that hybridizes under stringent conditions with a nucleic acid having a nucleotide sequence complementary to the nucleotide sequence of SEQ ID NO: 319;

[0186] (17αB1) a protein comprising at least one amino acid sequence selected from the group consisting of SEQ ID NOs: 321-325;

[0187] (17αA2) rab GDP dissociation inhibitor alpha-like or a variant thereof, which is defined below in any of (17αA2-a) to (17αA2-e):

[0188] (17αA2-a) a protein comprising an amino acid sequence with deletion, substitution, insertion or addition of one or several amino acids in SEQ ID NO: 327;

[0189] (17αA2-b) a protein comprising an amino acid sequence having at least 70% identity to the amino acid sequence of SEQ ID NO: 327;

[0190] (17αA2-c) a protein comprising an amino acid sequence encoded by a nucleotide sequence with deletion, substitution, insertion or addition of one or several nucleotides in SEQ ID NO: 326;

[0191] (17αA2-d) a protein comprising an amino acid sequence encoded by a nucleotide sequence having at least 70% identity to the nucleotide sequence of SEQ ID NO: 326; or

[0192] (17αA2-e) a protein comprising an amino acid sequence encoded by a nucleic acid that hybridizes under stringent conditions with a nucleic acid having a nucleotide sequence complementary to the nucleotide sequence of SEQ ID NO: 326; or

[0193] (17αB2) a protein comprising at least one amino acid sequence selected from the group consisting of SEQ ID NOs: 328-332;
[0194] (18α) (18αA) hypothetical protein GLYMA_10G028300 or a variant thereof, which is defined below in any of (18αA-a) to (18αA-e):

[0195] (18αA-a) a protein comprising an amino acid sequence with deletion, substitution, insertion or addition of one or several amino acids in SEQ ID NO: 334;

[0196] (18αA-b) a protein comprising an amino acid sequence having at least 70% identity to the amino acid sequence of SEQ ID NO: 334;

[0197] (18αA-c) a protein comprising an amino acid sequence encoded by a nucleotide sequence with deletion, substitution, insertion or addition of one or several nucleotides in SEQ ID NO: 333;

[0198] (18αA-d) a protein comprising an amino acid sequence encoded by a nucleotide sequence having at least 70% identity to the nucleotide sequence of SEQ ID NO: 333; or

[0199] (18αA-e) a protein comprising an amino acid sequence encoded by a nucleic acid that hybridizes under stringent conditions with a nucleic acid having a nucleotide sequence complementary to the nucleotide sequence of SEQ ID NO: 333; or

[0200] (18αB) a protein comprising at least one amino acid sequence selected from the group consisting of SEQ ID NOs: 335-339;
[0201] (19α) (19αA) sucrose binding protein homolog S-64 or a variant thereof, which is defined below in any of (19αA-a) to (19αA-e):

[0202] (19αA-a) a protein comprising an amino acid sequence with deletion, substitution, insertion or addition of one or several amino acids in SEQ ID NO: 341;

[0203] (19αA-b) a protein comprising an amino acid sequence having at least 70% identity to the amino acid sequence of SEQ ID NO: 341;

[0204] (19αA-c) a protein comprising an amino acid sequence encoded by a nucleotide sequence with deletion, substitution, insertion or addition of one or several nucleotides in SEQ ID NO: 340;

[0205] (19αA-d) a protein comprising an amino acid sequence encoded by a nucleotide sequence having at least 70% identity to the nucleotide sequence of SEQ ID NO: 340; or

[0206] (19αA-e) a protein comprising an amino acid sequence encoded by a nucleic acid that hybridizes under stringent conditions with a nucleic acid having a nucleotide sequence complementary to the nucleotide sequence of SEQ ID NO: 340; or

[0207] (19αB) a protein comprising at least one amino acid sequence selected from the group consisting of SEQ ID NOs: 342-346;
[0208] (25α) (25αA1) succinyl-CoA ligase [ADP-forming] subunit beta, mitochondrial or a variant thereof, which is defined below in any of (25αA1-a) to (25αA1-e):

[0209] (25αA1-a) a protein comprising an amino acid sequence with deletion, substitution, insertion or addition of one or several amino acids in SEQ ID NO: 348;

[0210] (25αA1-b) a protein comprising an amino acid sequence having at least 70% identity to the amino acid sequence of SEQ ID NO: 348;

[0211] (25αA1-c) a protein comprising an amino acid sequence encoded by a nucleotide sequence with deletion, substitution, insertion or addition of one or several nucleotides in SEQ ID NO: 347;

[0212] (25αA1-d) a protein comprising an amino acid sequence encoded by a nucleotide sequence having at least 70% identity to the nucleotide sequence of SEQ ID NO: 347; or

[0213] (25αA1-e) a protein comprising an amino acid sequence encoded by a nucleic acid that hybridizes under stringent conditions with a nucleic acid having a nucleotide sequence complementary to the nucleotide sequence of SEQ ID NO: 347;

[0214] (25αB 1) a protein comprising at least one amino acid sequence selected from the group consisting of SEQ ID NOs: 349-356;

[0215] (25αA2) succinyl-CoA ligase [ADP-forming] subunit beta, mitochondrial or a variant thereof, which is defined below in any of (25αA2-a) to (25αA2-e):

[0216] (25αA2-a) a protein comprising an amino acid sequence with deletion, substitution, insertion or addition of one or several amino acids in SEQ ID NO: 358;

[0217] (25αA2-b) a protein comprising an amino acid sequence having at least 70% identity to the amino acid sequence of SEQ ID NO: 358;

[0218] (25αA2-c) a protein comprising an amino acid sequence encoded by a nucleotide sequence with deletion, substitution, insertion or addition of one or several nucleotides in SEQ ID NO: 357;

[0219] (25αA2-d) a protein comprising an amino acid sequence encoded by a nucleotide sequence having at least 70% identity to the nucleotide sequence of SEQ ID NO: 357; or

[0220] (25αA2-e) a protein comprising an amino acid sequence encoded by a nucleic acid that hybridizes under stringent conditions with a nucleic acid having a nucleotide sequence complementary to the nucleotide sequence of SEQ ID NO: 357; or

[0221] (25αB2) a protein comprising at least one amino acid sequence selected from the group consisting of SEQ ID NOs: 359-365;
[0222] (26α) (26αA1) phosphoglycerate kinase, cytosolic or a variant thereof, which is defined below in any of (26αA1-a) to (26αA1-e):

[0223] (26αA1-a) a protein comprising an amino acid sequence with deletion, substitution, insertion or addition of one or several amino acids in SEQ ID NO: 367;

[0224] (26αA1-b) a protein comprising an amino acid sequence having at least 70% identity to the amino acid sequence of SEQ ID NO: 367;

[0225] (26αA1-c) a protein comprising an amino acid sequence encoded by a nucleotide sequence with deletion, substitution, insertion or addition of one or several nucleotides in SEQ ID NO: 366;

[0226] (26αA1-d) a protein comprising an amino acid sequence encoded by a nucleotide sequence having at least 70% identity to the nucleotide sequence of SEQ ID NO: 366; or

[0227] (26αA1-e) a protein comprising an amino acid sequence encoded by a nucleic acid that hybridizes under stringent conditions with a nucleic acid having a nucleotide sequence complementary to the nucleotide sequence of SEQ ID NO: 366;

[0228] (26αB1) a protein comprising at least one amino acid sequence selected from the group consisting of SEQ ID NOs: 368-382;

[0229] (26αA2) phosphoglycerate kinase, cytosolic or a variant thereof, which is defined below in any of (26αA2-a) to (26αA2-e):

[0230] (26αA2-a) a protein comprising an amino acid sequence with deletion, substitution, insertion or addition of one or several amino acids in SEQ ID NO: 384;

[0231] (26αA2-b) a protein comprising an amino acid sequence having at least 70% identity to the amino acid sequence of SEQ ID NO: 384;

[0232] (26αA2-c) a protein comprising an amino acid sequence encoded by a nucleotide sequence with deletion, substitution, insertion or addition of one or several nucleotides in SEQ ID NO: 383;

[0233] (26αA2-d) a protein comprising an amino acid sequence encoded by a nucleotide sequence having at least 70% identity to the nucleotide sequence of SEQ ID NO: 383; or

[0234] (26αA2-e) a protein comprising an amino acid sequence encoded by a nucleic acid that hybridizes under stringent conditions with a nucleic acid having a nucleotide sequence complementary to the nucleotide sequence of SEQ ID NO: 383;

[0235] (26αB2) a protein comprising at least one amino acid sequence selected from the group consisting of SEQ ID NOs: 385-392;

[0236] (26αA3) phosphoglycerate kinase, cytosolic or a variant thereof, which is defined below in any of (26αA3-a) to (26αA3-e):

[0237] (26αA3-a) a protein comprising an amino acid sequence with deletion, substitution, insertion or addition of one or several amino acids in SEQ ID NO: 394;

[0238] (26αA3-b) a protein comprising an amino acid sequence having at least 70% identity to the amino acid sequence of SEQ ID NO: 394;

[0239] (26αA3-c) a protein comprising an amino acid sequence encoded by a nucleotide sequence with deletion, substitution, insertion or addition of one or several nucleotides in SEQ ID NO: 393;

[0240] (26αA3-d) a protein comprising an amino acid sequence encoded by a nucleotide sequence having at least 70% identity to the nucleotide sequence of SEQ ID NO: 393; or

[0241] (26αA3-e) a protein comprising an amino acid sequence encoded by a nucleic acid that hybridizes under stringent conditions with a nucleic acid having a nucleotide sequence complementary to the nucleotide sequence of SEQ ID NO: 393; or

[0242] (26αB3) a protein comprising at least one amino acid sequence selected from the group consisting of SEQ ID NOs: 395-409;
[0243] (27α) (27αA1) alcohol dehydrogenase 1 or a variant thereof, which is defined below in any of (27αA1-a) to (27αA1-e):

[0244] (27αA1-a) a protein comprising an amino acid sequence with deletion, substitution, insertion or addition of one or several amino acids in SEQ ID NO: 411;

[0245] (27αA1-b) a protein comprising an amino acid sequence having at least 70% identity to the amino acid sequence of SEQ ID NO: 411;

[0246] (27αA1-c) a protein comprising an amino acid sequence encoded by a nucleotide sequence with deletion, substitution, insertion or addition of one or several nucleotides in SEQ ID NO: 410;

[0247] (27αA1-d) a protein comprising an amino acid sequence encoded by a nucleotide sequence having at least 70% identity to the nucleotide sequence of SEQ ID NO: 410; or

[0248] (27αA1-e) a protein comprising an amino acid sequence encoded by a nucleic acid that hybridizes under stringent conditions with a nucleic acid having a nucleotide sequence complementary to the nucleotide sequence of SEQ ID NO: 410;

[0249] (27αB 1) a protein comprising at least one amino acid sequence selected from the group consisting of SEQ ID NOs: 412-416;

[0250] (27αA2) alcohol dehydrogenase 1 or a variant thereof, which is defined below in any of (27αA2-a) to (27αA2-e):

[0251] (27αA2-a) a protein comprising an amino acid sequence with deletion, substitution, insertion or addition of one or several amino acids in SEQ ID NO: 418;

[0252] (27αA2-b) a protein comprising an amino acid sequence having at least 70% identity to the amino acid sequence of SEQ ID NO: 418;

[0253] (27αA2-c) a protein comprising an amino acid sequence encoded by a nucleotide sequence with deletion, substitution, insertion or addition of one or several nucleotides in SEQ ID NO: 417;

[0254] (27αA2-d) a protein comprising an amino acid sequence encoded by a nucleotide sequence having at least 70% identity to the nucleotide sequence of SEQ ID NO: 417; or

[0255] (27αA2-e) a protein comprising an amino acid sequence encoded by a nucleic acid that hybridizes under stringent conditions with a nucleic acid having a nucleotide sequence complementary to the nucleotide sequence of SEQ ID NO: 417;

[0256] (27αB2) a protein comprising at least one amino acid sequence selected from the group consisting of SEQ ID NOs: 419 and 420;

[0257] (27αA3) alcohol dehydrogenase 1-like or a variant thereof, which is defined below in any of (27αA3-a) to (27αA3-e):

[0258] (27αA3-a) a protein comprising an amino acid sequence with deletion, substitution, insertion or addition of one or several amino acids in SEQ ID NO: 422;

[0259] (27αA3-b) a protein comprising an amino acid sequence having at least 70% identity to the amino acid sequence of SEQ ID NO: 422;

[0260] (27αA3-c) a protein comprising an amino acid sequence encoded by a nucleotide sequence with deletion, substitution, insertion or addition of one or several nucleotides in SEQ ID NO: 421;

[0261] (27αA3-d) a protein comprising an amino acid sequence encoded by a nucleotide sequence having at least 70% identity to the nucleotide sequence of SEQ ID NO: 421; or

[0262] (27αA3-e) a protein comprising an amino acid sequence encoded by a nucleic acid that hybridizes under stringent conditions with a nucleic acid having a nucleotide sequence complementary to the nucleotide sequence of SEQ ID NO: 421; or

[0263] (27αB3) a protein comprising at least one amino acid sequence selected from the group consisting of SEQ ID NOs: 423-427;
[0264] (28α) (28αA) 35 kDa seed maturation protein isoform X1 or a variant thereof, which is defined below in any of (28αA-a) to (28αA-e):

[0265] (28αA-a) a protein comprising an amino acid sequence with deletion, substitution, insertion or addition of one or several amino acids in SEQ ID NO: 429;

[0266] (28αA-b) a protein comprising an amino acid sequence having at least 70% identity to the amino acid sequence of SEQ ID NO: 429;

[0267] (28αA-c) a protein comprising an amino acid sequence encoded by a nucleotide sequence with deletion, substitution, insertion or addition of one or several nucleotides in SEQ ID NO: 428;

[0268] (28αA-d) a protein comprising an amino acid sequence encoded by a nucleotide sequence having at least 70% identity to the nucleotide sequence of SEQ ID NO: 428; or

[0269] (28αA-e) a protein comprising an amino acid sequence encoded by a nucleic acid that hybridizes under stringent conditions with a nucleic acid having a nucleotide sequence complementary to the nucleotide sequence of SEQ ID NO: 428; or

[0270] (28αB) a protein comprising at least one amino acid sequence selected from the group consisting of SEQ ID NOs: 430-433;
[0271] (29-33α) (29-33αA1) glyceraldehyde-3-phosphate dehydrogenase isoform X1 or a variant thereof, which is defined below in any of (29-33αA1-a) to (29-33αA1-e):

[0272] (29-33αA1-α) a protein comprising an amino acid sequence with deletion, substitution, insertion or addition of one or several amino acids in SEQ ID NO: 435;

[0273] (29-33αA1-b) a protein comprising an amino acid sequence having at least 70% identity to the amino acid sequence of SEQ ID NO: 435;

[0274] (29-33αA1-c) a protein comprising an amino acid sequence encoded by a nucleotide sequence with deletion, substitution, insertion or addition of one or several nucleotides in SEQ ID NO: 434;

[0275] (29-33αA1-d) a protein comprising an amino acid sequence encoded by a nucleotide sequence having at least 70% identity to the nucleotide sequence of SEQ ID NO: 434; or

[0276] (29-33αA1-e) a protein comprising an amino acid sequence encoded by a nucleic acid that hybridizes under stringent conditions with a nucleic acid having a nucleotide sequence complementary to the nucleotide sequence of SEQ ID NO: 434;

[0277] (29-33αB1) a protein comprising at least one amino acid sequence selected from the group consisting of SEQ ID NOs: 436-439;

[0278] (29-33αA2) glyceraldehyde-3-phosphate dehydrogenase, cytosolic or a variant thereof, which is defined below in any of (29-33αA2-a) to (29-33αA2-e):

[0279] (29-33αA2-a) a protein comprising an amino acid sequence with deletion, substitution, insertion or addition of one or several amino acids in SEQ ID NO: 441;

[0280] (29-33αA2-b) a protein comprising an amino acid sequence having at least 70% identity to the amino acid sequence of SEQ ID NO: 441;

[0281] (29-33αA2-c) a protein comprising an amino acid sequence encoded by a nucleotide sequence with deletion, substitution, insertion or addition of one or several nucleotides in SEQ ID NO: 440;

[0282] (29-33αA2-d) a protein comprising an amino acid sequence encoded by a nucleotide sequence having at least 70% identity to the nucleotide sequence of SEQ ID NO: 440; or

[0283] (29-33αA2-e) a protein comprising an amino acid sequence encoded by a nucleic acid that hybridizes under stringent conditions with a nucleic acid having a nucleotide sequence complementary to the nucleotide sequence of SEQ ID NO: 440;

[0284] (29-33αB2) a protein comprising at least one amino acid sequence selected from the group consisting of SEQ ID NOs: 442-445;

[0285] (29-33αA3) uncharacterized protein LOC100782924 or a variant thereof, which is defined below in any of (29-33αA3-a) to (29-33αA3-e):

[0286] (29-33αA3-a) a protein comprising an amino acid sequence with deletion, substitution, insertion or addition of one or several amino acids in SEQ ID NO: 447;

[0287] (29-33αA3-b) a protein comprising an amino acid sequence having at least 70% identity to the amino acid sequence of SEQ ID NO: 447;

[0288] (29-33αA3-c) a protein comprising an amino acid sequence encoded by a nucleotide sequence with deletion, substitution, insertion or addition of one or several nucleotides in SEQ ID NO: 446;

[0289] (29-33αA3-d) a protein comprising an amino acid sequence encoded by a nucleotide sequence having at least 70% identity to the nucleotide sequence of SEQ ID NO: 446; or

[0290] (29-33αA3-e) a protein comprising an amino acid sequence encoded by a nucleic acid that hybridizes under stringent conditions with a nucleic acid having a nucleotide sequence complementary to the nucleotide sequence of SEQ ID NO: 446; or

[0291] (29-33αB3) a protein comprising at least one amino acid sequence selected from the group consisting of SEQ ID NOs: 448-451,
[0292] (34α) (34αA1) bifunctional UDP-glucose 4-epimerase and UDP-xylose 4-epimerase 1-like or a variant thereof, which is defined below in any of (34αA1-a) to (34αA1-e):

[0293] (34αA1-a) a protein comprising an amino acid sequence with deletion, substitution, insertion or addition of one or several amino acids in SEQ ID NO: 453;

[0294] (34αA1-b) a protein comprising an amino acid sequence having at least 70% identity to the amino acid sequence of SEQ ID NO: 453;

[0295] (34αA1-c) a protein comprising an amino acid sequence encoded by a nucleotide sequence with deletion, substitution, insertion or addition of one or several nucleotides in SEQ ID NO: 452;

[0296] (34αA1-d) a protein comprising an amino acid sequence encoded by a nucleotide sequence having at least 70% identity to the nucleotide sequence of SEQ ID NO: 452; or

[0297] (34αA1-e) a protein comprising an amino acid sequence encoded by a nucleic acid that hybridizes under stringent conditions with a nucleic acid having a nucleotide sequence complementary to the nucleotide sequence of SEQ ID NO: 452;

[0298] (34αB1) a protein comprising an amino acid sequence of SEQ ID NO: 454;

[0299] (34αA2) uncharacterized protein LOC100803483 or a variant thereof, which is defined below in any of (34αA2-a) to (34αA2-e):

[0300] (34αA2-a) a protein comprising an amino acid sequence with deletion, substitution, insertion or addition of one or several amino acids in SEQ ID NO: 456;

[0301] (34αA2-b) a protein comprising an amino acid sequence having at least 70% identity to the amino acid sequence of SEQ ID NO: 456;

[0302] (34αA2-c) a protein comprising an amino acid sequence encoded by a nucleotide sequence with deletion, substitution, insertion or addition of one or several nucleotides in SEQ ID NO: 455;

[0303] (34αA2-d) a protein comprising an amino acid sequence encoded by a nucleotide sequence having at least 70% identity to the nucleotide sequence of SEQ ID NO: 455; or

[0304] (34αA2-e) a protein comprising an amino acid sequence encoded by a nucleic acid that hybridizes under stringent conditions with a nucleic acid having a nucleotide sequence complementary to the nucleotide sequence of SEQ ID NO: 455; or

[0305] (34αB2) a protein comprising at least one amino acid sequence selected from the group consisting of SEQ ID NOs: 457 and 458;
[0306] (35α) (35αA1) elongation factor 1-alpha or a variant thereof, which is defined below in any of (35αA1-a) to (35αA1-e):

[0307] (35αA1-a) a protein comprising an amino acid sequence with deletion, substitution, insertion or addition of one or several amino acids in SEQ ID NO: 460;

[0308] (35αA1-b) a protein comprising an amino acid sequence having at least 70% identity to the amino acid sequence of SEQ ID NO: 460;

[0309] (35αA1-c) a protein comprising an amino acid sequence encoded by a nucleotide sequence with deletion, substitution, insertion or addition of one or several nucleotides in SEQ ID NO: 459;

[0310] (35αA1-d) a protein comprising an amino acid sequence encoded by a nucleotide sequence having at least 70% identity to the nucleotide sequence of SEQ ID NO: 459; or

[0311] (35αA1-e) a protein comprising an amino acid sequence encoded by a nucleic acid that hybridizes under stringent conditions with a nucleic acid having a nucleotide sequence complementary to the nucleotide sequence of SEQ ID NO: 459;

[0312] (35αB1) a protein comprising at least one amino acid sequence selected from the group consisting of SEQ ID NOs: 461-466;

[0313] (35αA2) elongation factor 1-alpha or a variant thereof, which is defined below in any of (35αA2-a) to (35αA2-e):

[0314] (35αA2-a) a protein comprising an amino acid sequence with deletion, substitution, insertion or addition of one or several amino acids in SEQ ID NO: 468;

[0315] (35αA2-b) a protein comprising an amino acid sequence having at least 70% identity to the amino acid sequence of SEQ ID NO: 468;

[0316] (35αA2-c) a protein comprising an amino acid sequence encoded by a nucleotide sequence with deletion, substitution, insertion or addition of one or several nucleotides in SEQ ID NO: 467;

[0317] (35αA2-d) a protein comprising an amino acid sequence encoded by a nucleotide sequence having at least 70% identity to the nucleotide sequence of SEQ ID NO: 467; or

[0318] (35αA2-e) a protein comprising an amino acid sequence encoded by a nucleic acid that hybridizes under stringent conditions with a nucleic acid having a nucleotide sequence complementary to the nucleotide sequence of SEQ ID NO: 467;

[0319] (35αB2) a protein comprising at least one amino acid sequence selected from the group consisting of SEQ ID NOs: 469-471;

[0320] (35αA3) elongation factor-1A isoform X1 or a variant thereof, which is defined below in any of (35αA3-a) to (35αA3-e):

[0321] (35αA3-a) a protein comprising an amino acid sequence with deletion, substitution, insertion or addition of one or several amino acids in SEQ ID NO: 473;

[0322] (35αA3-b) a protein comprising an amino acid sequence having at least 70% identity to the amino acid sequence of SEQ ID NO: 473;

[0323] (35αA3-c) a protein comprising an amino acid sequence encoded by a nucleotide sequence with deletion, substitution, insertion or addition of one or several nucleotides in SEQ ID NO: 472;

[0324] (35αA3-d) a protein comprising an amino acid sequence encoded by a nucleotide sequence having at least 70% identity to the nucleotide sequence of SEQ ID NO: 472; or

[0325] (35αA3-e) a protein comprising an amino acid sequence encoded by a nucleic acid that hybridizes under stringent conditions with a nucleic acid having a nucleotide sequence complementary to the nucleotide sequence of SEQ ID NO: 472; or

[0326] (35αB3) a protein comprising at least one amino acid sequence selected from the group consisting of SEQ ID NOs: 474-477;
[0327] (36, 37α) (36, 37αA1) seed maturation protein PM34 or a variant thereof, which is defined below in any of (36, 37αA1-a) to (36, 37αA1-e):

[0328] (36, 37αA1-a) a protein comprising an amino acid sequence with deletion, substitution, insertion or addition of one or several amino acids in SEQ ID NO: 479;

[0329] (36, 37αA1-b) a protein comprising an amino acid sequence having at least 70% identity to the amino acid sequence of SEQ ID NO: 479;

[0330] (36, 37αA1-c) a protein comprising an amino acid sequence encoded by a nucleotide sequence with deletion, substitution, insertion or addition of one or several nucleotides in SEQ ID NO: 478;

[0331] (36, 37αA1-d) a protein comprising an amino acid sequence encoded by a nucleotide sequence having at least 70% identity to the nucleotide sequence of SEQ ID NO: 478; or

[0332] (36, 37αA1-e) a protein comprising an amino acid sequence encoded by a nucleic acid that hybridizes under stringent conditions with a nucleic acid having a nucleotide sequence complementary to the nucleotide sequence of SEQ ID NO: 478;

[0333] (36, 37αB1) a protein comprising at least one amino acid sequence selected from the group consisting of SEQ ID NOs: 480-483;

[0334] (36, 37αA2) uncharacterized protein LOC100809384 or a variant thereof, which is defined below in any of (36, 37αA2-a) to (36, 37αA2-e):

[0335] (36, 37αA2-a) a protein comprising an amino acid sequence with deletion, substitution, insertion or addition of one or several amino acids in SEQ ID NO: 485;

[0336] (36, 37αA2-b) a protein comprising an amino acid sequence having at least 70% identity to the amino acid sequence of SEQ ID NO: 485;

[0337] (36, 37αA2-c) a protein comprising an amino acid sequence encoded by a nucleotide sequence with deletion, substitution, insertion or addition of one or several nucleotides in SEQ ID NO: 484;

[0338] (36, 37αA2-d) a protein comprising an amino acid sequence encoded by a nucleotide sequence having at least 70% identity to the nucleotide sequence of SEQ ID NO: 484; or

[0339] (36, 37αA2-e) a protein comprising an amino acid sequence encoded by a nucleic acid that hybridizes under stringent conditions with a nucleic acid having a nucleotide sequence complementary to the nucleotide sequence of SEQ ID NO: 484;

[0340] (36, 37αB2) a protein comprising at least one amino acid sequence selected from the group consisting of SEQ ID NOs: 486 and 487;

[0341] (36, 37αA3) hypothetical protein GLYMA10G155300 or a variant thereof, which is defined below in any of (36, 37αA3-a) to (36, 37αA3-e):

[0342] (36, 37αA3-a) a protein comprising an amino acid sequence with deletion, substitution, insertion or addition of one or several amino acids in SEQ ID NO: 489;

[0343] (36, 37αA3-b) a protein comprising an amino acid sequence having at least 70% identity to the amino acid sequence of SEQ ID NO: 489;

[0344] (36, 37αA3-c) a protein comprising an amino acid sequence encoded by a nucleotide sequence with deletion, substitution, insertion or addition of one or several nucleotides in SEQ ID NO: 488;

[0345] (36, 37αA3-d) a protein comprising an amino acid sequence encoded by a nucleotide sequence having at least 70% identity to the nucleotide sequence of SEQ ID NO: 488; or

[0346] (36, 37αA3-e) a protein comprising an amino acid sequence encoded by a nucleic acid that hybridizes under stringent conditions with a nucleic acid having a nucleotide sequence complementary to the nucleotide sequence of SEQ ID NO: 488; or

[0347] (36, 37αB3) a protein comprising at least one amino acid sequence selected from the group consisting of SEQ ID NOs: 490-493;
[0348] (38α) (38αA) seed biotin-containing protein SBP65-like isoform X1 or a variant thereof, which is defined below in any of (38αA-a) to (38αA-e):

[0349] (38αA-a) a protein comprising an amino acid sequence with deletion, substitution, insertion or addition of one or several amino acids in SEQ ID NO: 495;

[0350] (38αA-b) a protein comprising an amino acid sequence having at least 70% identity to the amino acid sequence of SEQ ID NO: 495;

[0351] (38αA-c) a protein comprising an amino acid sequence encoded by a nucleotide sequence with deletion, substitution, insertion or addition of one or several nucleotides in SEQ ID NO: 494;

[0352] (38αA-d) a protein comprising an amino acid sequence encoded by a nucleotide sequence having at least 70% identity to the nucleotide sequence of SEQ ID NO: 494; or

[0353] (38αA-e) a protein comprising an amino acid sequence encoded by a nucleic acid that hybridizes under stringent conditions with a nucleic acid having a nucleotide sequence complementary to the nucleotide sequence of SEQ ID NO: 494; or

[0354] (38αB) a protein comprising at least one amino acid sequence selected from the group consisting of SEQ ID NOs: 496-513;
[0355] (39α) (39αA) ATP synthase subunit O, mitochondrial-like or a variant thereof, which is defined below in any of (39αA-a) to (39αA-e):

[0356] (39αA-a) a protein comprising an amino acid sequence with deletion, substitution, insertion or addition of one or several amino acids in SEQ ID NO: 515;

[0357] (39αA-b) a protein comprising an amino acid sequence having at least 70% identity to the amino acid sequence of SEQ ID NO: 515;

[0358] (39αA-c) a protein comprising an amino acid sequence encoded by a nucleotide sequence with deletion, substitution, insertion or addition of one or several nucleotides in SEQ ID NO: 514;

[0359] (39αA-d) a protein comprising an amino acid sequence encoded by a nucleotide sequence having at least 70% identity to the nucleotide sequence of SEQ ID NO: 514; or

[0360] (39αA-e) a protein comprising an amino acid sequence encoded by a nucleic acid that hybridizes under stringent conditions with a nucleic acid having a nucleotide sequence complementary to the nucleotide sequence of SEQ ID NO: 514; or

[0361] (39αB) a protein comprising an amino acid sequence of SEQ ID NO: 516;
[0362] (40, 56α) (40, 56αA) P24 oleosin isoform A or a variant thereof, which is defined below in any of (40, 56αA-a) to (40, 56αA-e):

[0363] (40, 56αA-a) a protein comprising an amino acid sequence with deletion, substitution, insertion or addition of one or several amino acids in SEQ ID NO: 518;

[0364] (40, 56αA-b) a protein comprising an amino acid sequence having at least 70% identity to the amino acid sequence of SEQ ID NO: 518;

[0365] (40, 56αA-c) a protein comprising an amino acid sequence encoded by a nucleotide sequence with deletion, substitution, insertion or addition of one or several nucleotides in SEQ ID NO: 517;

[0366] (40, 56αA-d) a protein comprising an amino acid sequence encoded by a nucleotide sequence having at least 70% identity to the nucleotide sequence of SEQ ID NO: 517; or

[0367] (40, 56αA-e) a protein comprising an amino acid sequence encoded by a nucleic acid that hybridizes under stringent conditions with a nucleic acid having a nucleotide sequence complementary to the nucleotide sequence of SEQ ID NO: 517; or

[0368] (40, 56αB) a protein comprising at least one amino acid sequence selected from the group consisting of SEQ ID NOs: 519 and 520;
[0369] (41α) (41αA) uncharacterized protein At3g49720-like isoform X2 or a variant thereof, which is defined below in any of (41αA-a) to (41αA-e):

[0370] (41αA-a) a protein comprising an amino acid sequence with deletion, substitution, insertion or addition of one or several amino acids in SEQ ID NO: 522;

[0371] (41αA-b) a protein comprising an amino acid sequence having at least 70% identity to the amino acid sequence of SEQ ID NO: 522;

[0372] (41αA-c) a protein comprising an amino acid sequence encoded by a nucleotide sequence with deletion, substitution, insertion or addition of one or several nucleotides in SEQ ID NO: 521;

[0373] (41αA-d) a protein comprising an amino acid sequence encoded by a nucleotide sequence having at least 70% identity to the nucleotide sequence of SEQ ID NO: 521; or

[0374] (41αA-e) a protein comprising an amino acid sequence encoded by a nucleic acid that hybridizes under stringent conditions with a nucleic acid having a nucleotide sequence complementary to the nucleotide sequence of SEQ ID NO: 521; or

[0375] (41αB) a protein comprising an amino acid sequence of SEQ ID NO: 523;
[0376] (42, 43α) (42, 43αA1) superoxide dismutase [Mn], mitochondrial or a variant thereof, which is defined below in any of (42, 43αA1-a) to (42, 43αA1-e):

[0377] (42, 43αA1-a) a protein comprising an amino acid sequence with deletion, substitution, insertion or addition of one or several amino acids in SEQ ID NO: 525;

[0378] (42, 43αA1-b) a protein comprising an amino acid sequence having at least 70% identity to the amino acid sequence of SEQ ID NO: 525;

[0379] (42, 43αA1-c) a protein comprising an amino acid sequence encoded by a nucleotide sequence with deletion, substitution, insertion or addition of one or several nucleotides in SEQ ID NO: 524;

[0380] (42, 43αA1-d) a protein comprising an amino acid sequence encoded by a nucleotide sequence having at least 70% identity to the nucleotide sequence of SEQ ID NO: 524; or

[0381] (42, 43αA1-e) a protein comprising an amino acid sequence encoded by a nucleic acid that hybridizes under stringent conditions with a nucleic acid having a nucleotide sequence complementary to the nucleotide sequence of SEQ ID NO: 524;

[0382] (42, 43αB1) a protein comprising at least one amino acid sequence selected from the group consisting of SEQ ID NOs: 526-531;

[0383] (42, 43αA2) hypothetical protein GLYMA_04G221300 or a variant thereof, which is defined below in any of (42, 43αA2-a) to (42, 43αA2-e):

[0384] (42, 43αA2-a) a protein comprising an amino acid sequence with deletion, substitution, insertion or addition of one or several amino acids in SEQ ID NO: 533;

[0385] (42, 43αA2-b) a protein comprising an amino acid sequence having at least 70% identity to the amino acid sequence of SEQ ID NO: 533;

[0386] (42, 43αA2-c) a protein comprising an amino acid sequence encoded by a nucleotide sequence with deletion, substitution, insertion or addition of one or several nucleotides in SEQ ID NO: 532;

[0387] (42, 43αA2-d) a protein comprising an amino acid sequence encoded by a nucleotide sequence having at least 70% identity to the nucleotide sequence of SEQ ID NO: 532; or

[0388] (42, 43αA2-e) a protein comprising an amino acid sequence encoded by a nucleic acid that hybridizes under stringent conditions with a nucleic acid having a nucleotide sequence complementary to the nucleotide sequence of SEQ ID NO: 532; or

[0389] (42, 43αB2) a protein comprising at least one amino acid sequence selected from the group consisting of SEQ ID NOs: 534-539;
[0390] (45α) (45αA1) uncharacterized protein LOC100499771 or a variant thereof, which is defined below in any of (45αA1-a) to (45αA1-e):

[0391] (45αA1-a) a protein comprising an amino acid sequence with deletion, substitution, insertion or addition of one or several amino acids in SEQ ID NO: 541;

[0392] (45αA1-b) a protein comprising an amino acid sequence having at least 70% identity to the amino acid sequence of SEQ ID NO: 541;

[0393] (45αA1-c) a protein comprising an amino acid sequence encoded by a nucleotide sequence with deletion, substitution, insertion or addition of one or several nucleotides in SEQ ID NO: 540;

[0394] (45αA1-d) a protein comprising an amino acid sequence encoded by a nucleotide sequence having at least 70% identity to the nucleotide sequence of SEQ ID NO: 540; or

[0395] (45αA1-e) a protein comprising an amino acid sequence encoded by a nucleic acid that hybridizes under stringent conditions with a nucleic acid having a nucleotide sequence complementary to the nucleotide sequence of SEQ ID NO: 540;

[0396] (45αB1) a protein comprising at least one amino acid sequence selected from the group consisting of SEQ ID NOs: 542-545;

[0397] (45αA2) hypothetical protein GLYMA_09G192800 or a variant thereof, which is defined below in any of (45αA2-a) to (45αA2-e):

[0398] (45αA2-a) a protein comprising an amino acid sequence with deletion, substitution, insertion or addition of one or several amino acids in SEQ ID NO: 547;

[0399] (45αA2-b) a protein comprising an amino acid sequence having at least 70% identity to the amino acid sequence of SEQ ID NO: 547;

[0400] (45αA2-c) a protein comprising an amino acid sequence encoded by a nucleotide sequence with deletion, substitution, insertion or addition of one or several nucleotides in SEQ ID NO: 546;

[0401] (45αA2-d) a protein comprising an amino acid sequence encoded by a nucleotide sequence having at least 70% identity to the nucleotide sequence of SEQ ID NO: 546; or

[0402] (45αA2-e) a protein comprising an amino acid sequence encoded by a nucleic acid that hybridizes under stringent conditions with a nucleic acid having a nucleotide sequence complementary to the nucleotide sequence of SEQ ID NO: 546; or

[0403] (45αB2) a protein comprising at least one amino acid sequence selected from the group consisting of SEQ ID NOs: 548-551;
[0404] (46α) (46αA) seed maturation protein PM22 or a variant thereof, which is defined below in any of (46αA-a) to (46αA-e):

[0405] (46αA-a) a protein comprising an amino acid sequence with deletion, substitution, insertion or addition of one or several amino acids in SEQ ID NO: 553;

[0406] (46αA-b) a protein comprising an amino acid sequence having at least 70% identity to the amino acid sequence of SEQ ID NO: 553;

[0407] (46αA-c) a protein comprising an amino acid sequence encoded by a nucleotide sequence with deletion, substitution, insertion or addition of one or several nucleotides in SEQ ID NO: 552;

[0408] (46αA-d) a protein comprising an amino acid sequence encoded by a nucleotide sequence having at least 70% identity to the nucleotide sequence of SEQ ID NO: 552; or

[0409] (46αA-e) a protein comprising an amino acid sequence encoded by a nucleic acid that hybridizes under stringent conditions with a nucleic acid having a nucleotide sequence complementary to the nucleotide sequence of SEQ ID NO: 552; or

[0410] (46αB) a protein comprising an amino acid sequence of SEQ ID NO: 554;
[0411] (47α) (47αA1) eukaryotic translation initiation factor 5A-2 or a variant thereof, which is defined below in any of (47αA1-a) to (47αA1-e):

[0412] (47αA1-a) a protein comprising an amino acid sequence with deletion, substitution, insertion or addition of one or several amino acids in SEQ ID NO: 556;

[0413] (47αA1-b) a protein comprising an amino acid sequence having at least 70% identity to the amino acid sequence of SEQ ID NO: 556;

[0414] (47αA1-c) a protein comprising an amino acid sequence encoded by a nucleotide sequence with deletion, substitution, insertion or addition of one or several nucleotides in SEQ ID NO: 555;

[0415] (47αA1-d) a protein comprising an amino acid sequence encoded by a nucleotide sequence having at least 70% identity to the nucleotide sequence of SEQ ID NO: 555; or

[0416] (47αA1-e) a protein comprising an amino acid sequence encoded by a nucleic acid that hybridizes under stringent conditions with a nucleic acid having a nucleotide sequence complementary to the nucleotide sequence of SEQ ID NO: 555;

[0417] (47αB1) a protein comprising at least one amino acid sequence selected from the group consisting of SEQ ID NOs: 557 and 558;

[0418] (47αA2) uncharacterized protein LOC100305510 or a variant thereof, which is defined below in any of (47αA2-a) to (47αA2-e):

[0419] (47αA2-a) a protein comprising an amino acid sequence with deletion, substitution, insertion or addition of one or several amino acids in SEQ ID NO: 560;

[0420] (47αA2-b) a protein comprising an amino acid sequence having at least 70% identity to the amino acid sequence of SEQ ID NO: 560;

[0421] (47αA2-c) a protein comprising an amino acid sequence encoded by a nucleotide sequence with deletion, substitution, insertion or addition of one or several nucleotides in SEQ ID NO: 559;

[0422] (47αA2-d) a protein comprising an amino acid sequence encoded by a nucleotide sequence having at least 70% identity to the nucleotide sequence of SEQ ID NO: 559; or

[0423] (47αA2-e) a protein comprising an amino acid sequence encoded by a nucleic acid that hybridizes under stringent conditions with a nucleic acid having a nucleotide sequence complementary to the nucleotide sequence of SEQ ID NO: 559; or

[0424] (47αB2) a protein comprising at least one amino acid sequence selected from the group consisting of SEQ ID NOs: 561-563;
[0425] (48α) (48αA) uncharacterized protein LOC100306570 or a variant thereof, which is defined below in any of (48αA-a) to (48αA-e):

[0426] (48αA-a) a protein comprising an amino acid sequence with deletion, substitution, insertion or addition of one or several amino acids in SEQ ID NO: 565;

[0427] (48αA-b) a protein comprising an amino acid sequence having at least 70% identity to the amino acid sequence of SEQ ID NO: 565;

[0428] (48αA-c) a protein comprising an amino acid sequence encoded by a nucleotide sequence with deletion, substitution, insertion or addition of one or several nucleotides in SEQ ID NO: 564;

[0429] (48αA-d) a protein comprising an amino acid sequence encoded by a nucleotide sequence having at least 70% identity to the nucleotide sequence of SEQ ID NO: 564; or

[0430] (48αA-e) a protein comprising an amino acid sequence encoded by a nucleic acid that hybridizes under stringent conditions with a nucleic acid having a nucleotide sequence complementary to the nucleotide sequence of SEQ ID NO: 564; or

[0431] (48αB) a protein comprising at least one amino acid sequence selected from the group consisting of SEQ ID NOs: 566-570;
[0432] (50α) (50αA) uncharacterized protein LOC100813859 or a variant thereof, which is defined below in any of (50αA-a) to (50αA-e):

[0433] (50αA-a) a protein comprising an amino acid sequence with deletion, substitution, insertion or addition of one or several amino acids in SEQ ID NO: 572;

[0434] (50αA-b) a protein comprising an amino acid sequence having at least 70% identity to the amino acid sequence of SEQ ID NO: 572;

[0435] (50αA-c) a protein comprising an amino acid sequence encoded by a nucleotide sequence with deletion, substitution, insertion or addition of one or several nucleotides in SEQ ID NO: 571;

[0436] (50αA-d) a protein comprising an amino acid sequence encoded by a nucleotide sequence having at least 70% identity to the nucleotide sequence of SEQ ID NO: 571; or

[0437] (50αA-e) a protein comprising an amino acid sequence encoded by a nucleic acid that hybridizes under stringent conditions with a nucleic acid having a nucleotide sequence complementary to the nucleotide sequence of SEQ ID NO: 571; or

[0438] (50αB) a protein comprising at least one amino acid sequence selected from the group consisting of SEQ ID NOs: 573-576;
[0439] (51α) (51αA) 14-3-3-like protein or a variant thereof, which is defined below in any of (51αA-a) to (51αA-e):

[0440] (51αA-a) a protein comprising an amino acid sequence with deletion, substitution, insertion or addition of one or several amino acids in SEQ ID NO: 578;

[0441] (51αA-b) a protein comprising an amino acid sequence having at least 70% identity to the amino acid sequence of SEQ ID NO: 578;

[0442] (51αA-c) a protein comprising an amino acid sequence encoded by a nucleotide sequence with deletion, substitution, insertion or addition of one or several nucleotides in SEQ ID NO: 577;

[0443] (51αA-d) a protein comprising an amino acid sequence encoded by a nucleotide sequence having at least 70% identity to the nucleotide sequence of SEQ ID NO: 577; or

[0444] (51αA-e) a protein comprising an amino acid sequence encoded by a nucleic acid that hybridizes under stringent conditions with a nucleic acid having a nucleotide sequence complementary to the nucleotide sequence of SEQ ID NO: 577; or

[0445] (51αB) a protein comprising at least one amino acid sequence selected from the group consisting of SEQ ID NOs: 579-582;
[0446] (52α) (52αA) probable fructokinase-4 or a variant thereof, which is defined below in any of (52αA-a) to (52αA-e):

[0447] (52αA-a) a protein comprising an amino acid sequence with deletion, substitution, insertion or addition of one or several amino acids in SEQ ID NO: 584;

[0448] (52αA-b) a protein comprising an amino acid sequence having at least 70% identity to the amino acid sequence of SEQ ID NO: 584;

[0449] (52αA-c) a protein comprising an amino acid sequence encoded by a nucleotide sequence with deletion, substitution, insertion or addition of one or several nucleotides in SEQ ID NO: 583;

[0450] (52αA-d) a protein comprising an amino acid sequence encoded by a nucleotide sequence having at least 70% identity to the nucleotide sequence of SEQ ID NO: 583; or

[0451] (52αA-e) a protein comprising an amino acid sequence encoded by a nucleic acid that hybridizes under stringent conditions with a nucleic acid having a nucleotide sequence complementary to the nucleotide sequence of SEQ ID NO: 583; or

[0452] (52αB) a protein comprising at least one amino acid sequence selected from the group consisting of SEQ ID NOs: 585-588;
[0453] (53α) (53αA1) triosephosphate isomerase isoform X1 or a variant thereof, which is defined below in any of (53αA1-a) to (53αA1-e):

[0454] (53αA1-α) a protein comprising an amino acid sequence with deletion, substitution, insertion or addition of one or several amino acids in SEQ ID NO: 590;

[0455] (53αA1-b) a protein comprising an amino acid sequence having at least 70% identity to the amino acid sequence of SEQ ID NO: 590;

[0456] (53αA1-c) a protein comprising an amino acid sequence encoded by a nucleotide sequence with deletion, substitution, insertion or addition of one or several nucleotides in SEQ ID NO: 589;

[0457] (53αA1-d) a protein comprising an amino acid sequence encoded by a nucleotide sequence having at least 70% identity to the nucleotide sequence of SEQ ID NO: 589; or

[0458] (53αA1-e) a protein comprising an amino acid sequence encoded by a nucleic acid that hybridizes under stringent conditions with a nucleic acid having a nucleotide sequence complementary to the nucleotide sequence of SEQ ID NO: 589;

[0459] (53αB1) a protein comprising at least one amino acid sequence selected from the group consisting of SEQ ID NOs: 591-597;

[0460] (53αA2) triosephosphate isomerase, cytosolic or a variant thereof, which is defined below in any of (53αA2-a) to (53αA2-e):

[0461] (53αA2-a) a protein comprising an amino acid sequence with deletion, substitution, insertion or addition of one or several amino acids in SEQ ID NO: 599;

[0462] (53αA2-b) a protein comprising an amino acid sequence having at least 70% identity to the amino acid sequence of SEQ ID NO: 599;

[0463] (53αA2-c) a protein comprising an amino acid sequence encoded by a nucleotide sequence with deletion, substitution, insertion or addition of one or several nucleotides in SEQ ID NO: 598;

[0464] (53αA2-d) a protein comprising an amino acid sequence encoded by a nucleotide sequence having at least 70% identity to the nucleotide sequence of SEQ ID NO: 598; or

[0465] (53αA2-e) a protein comprising an amino acid sequence encoded by a nucleic acid that hybridizes under stringent conditions with a nucleic acid having a nucleotide sequence complementary to the nucleotide sequence of SEQ ID NO: 598; or

[0466] (53αB2) a protein comprising at least one amino acid sequence selected from the group consisting of SEQ ID NOs: 600-604;
[0467] (54α) (54αA1) superoxide dismutase [Fe], chloroplastic isoform X1 or a variant thereof, which is defined below in any of (54αA1-a) to (54αA1-e):

[0468] (54αA1-a) a protein comprising an amino acid sequence with deletion, substitution, insertion or addition of one or several amino acids in SEQ ID NO: 606;

[0469] (54αA1-b) a protein comprising an amino acid sequence having at least 70% identity to the amino acid sequence of SEQ ID NO: 606;

[0470] (53αA1-c) a protein comprising an amino acid sequence encoded by a nucleotide sequence with deletion, substitution, insertion or addition of one or several nucleotides in SEQ ID NO: 605;

[0471] (54αA1-d) a protein comprising an amino acid sequence encoded by a nucleotide sequence having at least 70% identity to the nucleotide sequence of SEQ ID NO: 605; or

[0472] (54αA1-e) a protein comprising an amino acid sequence encoded by a nucleic acid that hybridizes under stringent conditions with a nucleic acid having a nucleotide sequence complementary to the nucleotide sequence of SEQ ID NO: 605;

[0473] (54αB1) a protein comprising at least one amino acid sequence selected from the group consisting of SEQ ID NOs: 607-611;

[0474] (54αA2) iron-superoxide dismutase or a variant thereof, which is defined below in any of (54αA2-a) to (54αA2-e):

[0475] (54αA2-a) a protein comprising an amino acid sequence with deletion, substitution, insertion or addition of one or several amino acids in SEQ ID NO: 613;

[0476] (54αA2-b) a protein comprising an amino acid sequence having at least 70% identity to the amino acid sequence of SEQ ID NO: 613;

[0477] (54αA2-c) a protein comprising an amino acid sequence encoded by a nucleotide sequence with deletion, substitution, insertion or addition of one or several nucleotides in SEQ ID NO: 612;

[0478] (54αA2-d) a protein comprising an amino acid sequence encoded by a nucleotide sequence having at least 70% identity to the nucleotide sequence of SEQ ID NO: 612; or

[0479] (54αA2-e) a protein comprising an amino acid sequence encoded by a nucleic acid that hybridizes under stringent conditions with a nucleic acid having a nucleotide sequence complementary to the nucleotide sequence of SEQ ID NO: 612; or

[0480] (54αB2) a protein comprising at least one amino acid sequence selected from the group consisting of SEQ ID NOs: 614-616; or
[0481] (55α) (55αA1) 51 kDa seed maturation protein precursor or a variant thereof, which is defined below in any of (55αA1-a) to (55αA1-e):

[0482] (55αA1-a) a protein comprising an amino acid sequence with deletion, substitution, insertion or addition of one or several amino acids in SEQ ID NO: 618;

[0483] (55αA1-b) a protein comprising an amino acid sequence having at least 70% identity to the amino acid sequence of SEQ ID NO: 618;

[0484] (55αA1-c) a protein comprising an amino acid sequence encoded by a nucleotide sequence with deletion, substitution, insertion or addition of one or several nucleotides in SEQ ID NO: 617;

[0485] (55αA1-d) a protein comprising an amino acid sequence encoded by a nucleotide sequence having at least 70% identity to the nucleotide sequence of SEQ ID NO: 617; or

[0486] (55αA1-e) a protein comprising an amino acid sequence encoded by a nucleic acid that hybridizes under stringent conditions with a nucleic acid having a nucleotide sequence complementary to the nucleotide sequence of SEQ ID NO: 617;

[0487] (55αB1) a protein comprising at least one amino acid sequence selected from the group consisting of SEQ ID NOs: 619-635;

[0488] (55αA2) Lea protein precursor or a variant thereof, which is defined below in any of

[0489] (55αA2-a) to (55αA2-e):

[0490] (55αA2-a) a protein comprising an amino acid sequence with deletion, substitution, insertion or addition of one or several amino acids in SEQ ID NO: 637;

[0491] (55αA2-b) a protein comprising an amino acid sequence having at least 70% identity to the amino acid sequence of SEQ ID NO: 637;

[0492] (55αA2-c) a protein comprising an amino acid sequence encoded by a nucleotide sequence with deletion, substitution, insertion or addition of one or several nucleotides in SEQ ID NO: 636;

[0493] (55αA2-d) a protein comprising an amino acid sequence encoded by a nucleotide sequence having at least 70% identity to the nucleotide sequence of SEQ ID NO: 636; or

[0494] (55αA2-e) a protein comprising an amino acid sequence encoded by a nucleic acid that hybridizes under stringent conditions with a nucleic acid having a nucleotide sequence complementary to the nucleotide sequence of SEQ ID NO: 636; or

[0495] (55αB2) a protein comprising at least one amino acid sequence selected from the group consisting of SEQ ID NOs: 638-649.

[0496] [2] A composition for diagnosing an allergy to a soybean, comprising, as an antigen, at least one of proteins as defined above in any of (1α) to (55α) of [1].

[0497] [3] A method for providing an indicator for diagnosing an allergy to a soybean in a subject, the method comprising the steps of:
[0498] (i) contacting a sample obtained from the subject with an antigen, wherein the sample is a solution comprising an Ig antibody;
[0499] (ii) detecting binding between the IgE antibody present in the sample from the subject and the antigen; and
[0500] (iii) when the binding between the IgE antibody in the subject and the antigen is detected, an indicator of the fact that the subject is allergic to a soybean is provided;
   wherein the antigen is at least one of proteins as defined above in any of (lot) to (55α) of [1].

[0501] [4] A pharmaceutical composition comprising at least one of proteins as defined above in any of (1α) to (55α) of [1].

[0502] [5] The pharmaceutical composition as set forth in [4], wherein the pharmaceutical composition is intended for the treatment of an allergy to a soybean.

[0503] [6] A soybean or processed products of soybean in which an antigen is eliminated or reduced, wherein the antigen is at least one of proteins as defined above in any of (1α) to (55α) of [1].

[0504] [7] A method for producing processed products of soybean in which an antigen is eliminated or reduced, the method comprising the step of confirming that the antigen is eliminated or reduced in a production process of the processed products, wherein the antigen is at least one of proteins as defined above in any of (1α) to (55α) of [1].

[0505] [8] A tester for determining the presence or absence of a soybean antigen in an object of interest, comprising an antibody that binds to at least one of proteins as defined above in any of (1α) to (55α) of [1].

[0506] [9] A soybean-derived antigen which is at least one of proteins as defined above in any of (1α) to (55α) of [1] and is causative of an allergy to soybean.

[0507] The present inventors also succeeded in finding epitopes as to the novel antigens.

[0508] As mentioned above, interaction between IgE antibodies from allergic patients and particular antigens elicit allergic reactions. These IgE antibodies recognize and bind to epitopes that are particular amino acid sequences in allergen components. Since the epitopes have a relatively short amino acid sequence, the IgE antibodies are capable of binding to different allergen components if the same amino acid sequence is present in the different allergen components. When different allergen components have a common epitope so that IgE antibodies from allergic patients bind to both of them, the allergens have cross-reactivity (or also called cross-antigenicity). Thus, the epitopes defined in the present invention enable diagnosis or treatment of an allergy including cross-reactivity, and detection of a plurality of allergen components comprising the epitopes, etc.

[0509] The present invention has been completed based on this finding. Thus, in another embodiment, the present invention can be as defined below.

[0510] [10] A polypeptide specifically binding to an IgE antibody from an allergic patient, the polypeptide being any one of the following:
[0511] (1β) a polypeptide comprising at least one amino acid sequence selected from the group consisting of SEQ ID NOs: 650-660;
[0512] (2β) a polypeptide comprising at least one amino acid sequence selected from the group consisting of SEQ ID NOs: 661-692;
[0513] (4β) a polypeptide comprising at least one amino acid sequence selected from the group consisting of SEQ ID NOs: 717-731;
[0514] (5β) a polypeptide comprising at least one amino acid sequence selected from the group consisting of SEQ ID NOs: 732-738;
[0515] (6β) a polypeptide comprising at least one amino acid sequence selected from the group consisting of SEQ ID NOs: 739 and 740;
[0516] (7β) a polypeptide comprising at least one amino acid sequence selected from the group consisting of SEQ ID NOs: 741-744;
[0517] (9β) a polypeptide comprising at least one amino acid sequence selected from the group consisting of SEQ ID NOs: 745-749;
[0518] (11β) a polypeptide comprising at least one amino acid sequence selected from the group consisting of SEQ ID NOs: 751-754;
[0519] (12β) a polypeptide comprising the amino acid sequence of SEQ ID NO: 755;
[0520] (13β) a polypeptide comprising at least one amino acid sequence selected from the group consisting of SEQ ID NOs: 756-758;
[0521] (14β) a polypeptide comprising at least one amino acid sequence selected from the group consisting of SEQ ID NOs: 759-764;
[0522] (15β) a polypeptide comprising at least one amino acid sequence selected from the group consisting of SEQ ID NOs: 765 and 766;
[0523] (17β) a polypeptide comprising the amino acid sequence of SEQ ID NO: 767;
[0524] (18β) a polypeptide comprising at least one amino acid sequence selected from the group consisting of SEQ ID NOs: 750 and 768-775;
[0525] (19β) a polypeptide comprising at least one amino acid sequence selected from the group consisting of SEQ ID NOs: 776-787;
[0526] (25β) a polypeptide comprising at least one amino acid sequence selected from the group consisting of SEQ ID NOs: 814 and 815;
[0527] (26β) a polypeptide comprising at least one amino acid sequence selected from the group consisting of SEQ ID NOs: 816-819;
[0528] (27β) a polypeptide comprising the amino acid sequence of SEQ ID NO: 820;
[0529] (28β) a polypeptide comprising at least one amino acid sequence selected from the group consisting of SEQ ID NOs: 821-835;
[0530] (29β) a polypeptide comprising at least one amino acid sequence selected from the group consisting of SEQ ID NOs: 836-839;
[0531] (34β) a polypeptide comprising at least one amino acid sequence selected from the group consisting of SEQ ID NOs: 840-846;
[0532] (35β) a polypeptide comprising at least one amino acid sequence selected from the group consisting of SEQ ID NOs: 847-856;
[0533] (36β) a polypeptide comprising at least one amino acid sequence selected from the group consisting of SEQ ID NOs: 857-861;
[0534] (38β) a polypeptide comprising at least one amino acid sequence selected from the group consisting of SEQ ID NOs: 862-892;
[0535] (39β) a polypeptide comprising at least one amino acid sequence selected from the group consisting of SEQ ID NOs: 893-895;
[0536] (40β) a polypeptide comprising at least one amino acid sequence selected from the group consisting of SEQ ID NOs: 896-902;
[0537] (41β) a polypeptide comprising the amino acid sequence of SEQ ID NO: 903;
[0538] (42β) a polypeptide comprising at least one amino acid sequence selected from the group consisting of SEQ ID NOs: 904-906;
[0539] (45β) a polypeptide comprising at least one amino acid sequence selected from the group consisting of SEQ ID NOs: 910-912;
[0540] (46β) a polypeptide comprising at least one amino acid sequence selected from the group consisting of SEQ ID NOs: 913-915;
[0541] (47β) a polypeptide comprising at least one amino acid sequence selected from the group consisting of SEQ ID NOs: 916-918;
[0542] (48β) a polypeptide comprising at least one amino acid sequence selected from the group consisting of SEQ ID NOs: 919-922;
[0543] (50β) a polypeptide comprising at least one amino acid sequence selected from the group consisting of SEQ ID NOs: 924-927;
[0544] (51β) a polypeptide comprising at least one amino acid sequence selected from the group consisting of SEQ ID NOs: 928-930;
[0545] (52β) a polypeptide comprising at least one amino acid sequence selected from the group consisting of SEQ ID NOs: 931-938;
[0546] (53β) a polypeptide comprising the amino acid sequence of SEQ ID NO: 939;
[0547] (54β) a polypeptide comprising at least one amino acid sequence selected from the group consisting of SEQ ID NOs: 940-943; and (55β) a polypeptide comprising at least one amino acid sequence selected from the group consisting of SEQ ID NOs: 944-952.

[0548] [11] A polypeptide specifically binding to an IgE antibody from an allergic patient, the polypeptide being any one of the following:
[0549] (3β) a polypeptide comprising at least one amino acid sequence selected from the group consisting of SEQ ID NOs: 693-716;
[0550] (20β) a polypeptide comprising at least one amino acid sequence selected from the group consisting of SEQ ID NOs: 788-792;
[0551] (21β) a polypeptide comprising at least one amino acid sequence selected from the group consisting of SEQ ID NOs: 793-802;
[0552] (22β) a polypeptide comprising at least one amino acid sequence selected from the group consisting of SEQ ID NOs: 803-808;
[0553] (23β) a polypeptide comprising at least one amino acid sequence selected from the group consisting of SEQ ID NOs: 809-812;
[0554] (24β) a polypeptide comprising the amino acid sequence of SEQ ID NO: 813;
[0555] (44β) a polypeptide comprising at least one amino acid sequence selected from the group consisting of SEQ ID NOs: 907-909;
[0556] (49β) a polypeptide comprising the amino acid sequence of SEQ ID NO: 923;
[0557] (57β) a polypeptide comprising at least one amino acid sequence selected from the group consisting of SEQ ID NOs: 953-955;
[0558] (58β) a polypeptide comprising at least one amino acid sequence selected from the group consisting of SEQ ID NOs: 956-960;
[0559] (59β) a polypeptide comprising at least one amino acid sequence selected from the group consisting of SEQ ID NOs: 961 and 962; and
[0560] (60β) a polypeptide comprising the amino acid sequence of SEQ ID NO: 963.

[0561] [12] The polypeptide according to the above [10] or [11], wherein the number of amino acid residues is 500 or less.

[0562] [13] A kit for diagnosing an allergy, comprising at least one of polypeptides according to any one of the above [10] to [12].

[0563] [14] A composition for diagnosing an allergy, the composition comprising at least one of polypeptides according to any one of the above [10] to [12] as an antigen.

[0564] [15] A method for providing an indicator for diagnosing an allergy in a subject, the method comprising the steps of:

[0565] (i) contacting a sample obtained from the subject with an antigen, wherein the sample is a solution comprising an Ig antibody;

[0566] (ii) detecting binding between the IgE antibody present in the sample obtained from the subject and the antigen; and

[0567] (iii) when the binding between the IgE antibody in the subject and the antigen is detected, an indicator of the fact that the subject is allergic is provided;

[0568] wherein the antigen is at least one of polypeptides according to any one of the above [10] to [12].

[0569] [16] A pharmaceutical composition comprising at least one of polypeptides according to any one of the above [10] to [12].

[0570] [17] The pharmaceutical composition according to the above [16], wherein the pharmaceutical composition is intended for the treatment of an allergy.

[0571] [18] A tester for determining the presence or absence of an antigen in an object of interest, the tester comprising an antibody that binds to at least one of polypeptides according to any one of the above [10] to [12].

[0572] [19] A food raw material or an edible processed product in which an antigen is eliminated or reduced, or a polypeptide is cleaved or removed, wherein the antigen is at least one of polypeptides according to any one of the above [10] to [12].

[0573] [20] A method for producing an edible processed product in which an antigen is eliminated or reduced, or a polypeptide is cleaved or removed, the method comprising the step of confirming that the antigen is eliminated or reduced, or the polypeptide is cleaved or removed, in a production process of the processed product, wherein the antigen is at least one of polypeptides according to any one of the above [10] to [12].

### ADVANTAGEOUS EFFECTS OF INVENTION

[0574] The present invention can provide novel antigens of an allergy to soybean. Since the novel antigens (allergen components) that trigger a soybean allergy were identified according to this invention, this invention can provide highly sensitive methods and kits for diagnosing an allergy to soybean, pharmaceutical compositions comprising such an antigen, soybean or processed products of soybean in which such an antigen is eliminated or reduced.

[0575] The present invention can provide novel polypeptides comprising an epitope of an allergen. Use of the polypeptide of the present invention enables provision of highly sensitive methods and kits for diagnosing an allergy, comprising such a polypeptide, pharmaceutical compositions comprising such a polypeptide, food raw materials or edible processed products in which an antigen comprising such a polypeptide is eliminated or reduced, or such a polypeptide is cleaved or removed, and a method for producing the edible processed products.

### BRIEF DESCRIPTION OF DRAWINGS

[0576] FIG. 1 is a photograph of a gel showing a protein electrophoretic pattern in two-dimensional electrophoresis of proteins contained in soybean. The bands at the left of the photograph are bands of molecular weight markers.

[0577] FIG. 2 is a photograph of an immunoblot of a two-dimensional electrophoretic pattern of proteins contained in soybean stained with serum of a healthy subject.

[0578] FIG. 3A is a photograph of an immunoblot of a two-dimensional electrophoretic pattern of proteins contained in soybean stained with serum of Soybean-allergic patient 1α. The spots indicated with a white line or enclosed in a square are spot where the serum of the soybean-allergic patient specifically reacted. The numbers (n) indicated are the numbers of the spots and correspond to the spots indicated with “nα” herein.

[0579] FIG. 3B is a photograph of an immunoblot of a two-dimensional electrophoretic pattern of proteins contained in soybean stained with serum of Soybean-allergic patient 2α. The spots indicated with a white line or enclosed in a square are spot where the serum of the soybean-allergic patient specifically reacted. The numbers (n) indicated are the numbers of the spots and correspond to the spots indicated with “nα” herein.

[0580] FIG. 3C is a photograph of an immunoblot of a two-dimensional electrophoretic pattern of proteins contained in soybean stained with serum of Soybean-allergic patient 3α. The spots indicated with a white line or enclosed in a square are spot where the serum of the soybean-allergic patient specifically reacted. The numbers (n) indicated are the numbers of the spots and correspond to the spots indicated with “nα” herein.

[0581] FIG. 3D is a photograph of an immunoblot of a two-dimensional electrophoretic pattern of proteins contained in soybean stained with serum of Soybean-allergic patient 4α. The spots indicated with a while line are spots where the serum of the soybean-allergic patient specifically reacted. The numbers (n) indicated are the numbers of the spots and correspond to the spots indicated with “nα” herein.

[0582] FIG. 3E is a photograph of an immunoblot of a two-dimensional electrophoretic pattern of proteins contained in soybean stained with serum of Soybean-allergic patient 5α. The spots indicated with a while line are spots where the serum of the soybean-allergic patient specifically reacted. The numbers (n) indicated are the numbers of the spots and correspond to the spots indicated with “nα” herein.

[0583] FIG. 3F is a photograph of an immunoblot of a two-dimensional electrophoretic pattern of proteins contained in soybean stained with serum of Soybean-allergic patient 6α. The spots indicated with a white line or enclosed in a square are spot where the serum of the soybean-allergic patient specifically reacted. The numbers (n) indicated are the numbers of the spots and correspond to the spots indicated with “nα” herein.

[0584] FIG. 3G is a photograph of an immunoblot of a two-dimensional electrophoretic pattern of proteins contained in soybean stained with serum of Soybean-allergic patient 7α. The spots enclosed in a square are spots where the serum of the soybean-allergic patient specifically reacted. The numbers (n) indicated are the numbers of the spots and correspond to the spots indicated with “nα” herein.

[0585] FIG. 3H is a photograph of an immunoblot of a two-dimensional electrophoretic pattern of proteins contained in soybean stained with serum of Soybean-allergic patient 8α. The spots indicated with a white line or enclosed in a square are spot where the serum of the soybean-allergic patient specifically reacted. The numbers (n) indicated are the numbers of the spots and correspond to the spots indicated with “nα” herein.

[0586] FIG. 3I is a photograph of an immunoblot of a two-dimensional electrophoretic pattern of proteins contained in soybean stained with serum of Soybean-allergic patient 9α. The spots indicated with a white line or enclosed in a square are spot where the serum of the soybean-allergic patient specifically reacted. The numbers (n) indicated are the numbers of the spots and correspond to the spots indicated with “nα” herein.

[0587] FIG. 4 is a diagram showing one example of results of determining peptides having the minimum number of amino acids functioning as an epitope by an overlapping technique.

[0588] FIG. 5 is a diagram showing one example of results of studying positions important for exertion of antigenicity as to the identified epitopes by an alanine scanning technique.

[0589] FIG. 6 is a graph showing results of studying cross-reactivity.

### DESCRIPTION OF EMBODIMENTS

[0590] The present invention will be described in detail below, but the present invention is not limited to them.

[0591] Unless otherwise defined herein, all scientific and technical terms used in relation to the present invention shall have meanings commonly understood by those skilled in the art.

[0592] Amino acid sequences herein are represented by one-letter amino acid symbols well known to those skilled in the art and the left end corresponds to the amino terminal and the right end corresponds to the carboxy terminal.

[0593] As referred to herein, the “allergy” refers to the state in which, when a certain antigen enters the body of a living individual sensitized to said antigen, the living individual shows a hypersensitive reaction detrimental to him/her. In blood and tissues of individuals with many food-allergic diseases, IgE antibodies specific to antigens are produced. IgE antibodies bind to mast cells or basophils. When an antigen specific to such an IgE antibody enters again the body of a patient with an allergic disease, said antigen combines with the IgE antibody bound to mast cells or basophils, and the IgE antibody crosslinks said antigen on the cell surface, resulting in physiological effects of IgE antibody-antigen interaction. Examples of such physiological effects include release of histamine, serotonin, heparin, eosinophil chemotactic factors, leucotrienes, or the like. These released substances provoke an allergic reaction resulting from the combination of an IgE antibody with particular antigens. Such allergic reactions caused by particular antigens occur through the aforementioned pathway.

[0594] In the present invention, the allergy of interest is not particularly limited as long as it is an allergy to an allergen comprising an epitope to be used. Such an allergy may include allergies to plants of the family Malvaceae, the family Rubiaceae, the family Brassicaceae, the family Poaceae, the family Cucurbitaceae, the family Compositae, the family Asparagaceae, the family Juglandaceae, the family Rhamnaceae, the family Pedaliaceae, the family Umbelliferae, the family Euphorbiaceae, the family Solanaceae, the family Bromeliaceae, the family Caricaceae, the family Rosaceae, the family Amaranthaceae, the family Vitaceae, the family Leguminosae, the family Lythraceae and/or the family Betulaceae. Examples of the plant of the family Malvaceae include nalta jute (Jew's mallow, scientific name: Corchorus olitorius) and cacao (scientific name: Theobroma cacao). Examples of the plant of the family Rubiaceae include Robusta coffee (scientific name: Coffea canephora). Examples of the plant of the family Brassicaceae include Qing geng cai (scientific name: Brassica rapa), radish (scientific name: Raphanus sativus), and rapeseed (scientific name: Brassica napus). Examples of the plant of the family Poaceae include great millet (scientific name: Sorghum bicolor), corn (scientific name: Zea mays), and bread wheat (scientific name: Triticum aestivum). Examples of the plant of the family Cucurbitaceae include melon (scientific name: Cucumis melo), bitter melon (bitter gourd, scientific name: Momordica charantia), and cucumber (scientific name: Cucumis sativus). Examples of the plant of the family Compositae include sunflower (scientific name: Helianthus annuus). Examples of the plant of the family Asparagaceae include asparagus (scientific name: Asparagus officinalis). Examples of the plant of the family Juglandaceae include Persian walnut (scientific name: Juglans regia). Examples of the plant of the family Rhamnaceae include Chinese date (scientific name: Ziziphus jujuba). Examples of the plant of the family Pedaliaceae include sesame (scientific name: Sesamum indicum). Examples of the plant of the family Umbelliferae include carrot (scientific name: Daucus carota subsp. sativus). Examples of the plant of the family Euphorbiaceae include cassava (scientific name: Manihot esculenta). Examples of the plant of the family Solanaceae include red pepper (scientific name: Capsicum annuum) and tomato (scientific name: Solanum lycopersicum). Examples of the plant of the family Bromeliaceae include pineapple (scientific name: Ananas comosus). Examples of the plant of the family Caricaceae include papaya (scientific name: Carica papaya). Examples of the plant of the family Rosaceae include apple (scientific name: Malus domestica), wild cherry (scientific name: Prunus avium), and peach (scientific name: Prunus persica). Examples of the plant of the family Amaranthaceae include quinua (scientific name: Chenopodium quinoa), spinach (scientific name: Spinacia oleracea), and beet (scientific name: Beta vulgaris subsp. vulgaris). Examples of the plant of the family Vitaceae include common grape (scientific name: Vitis vinifera). Examples of the plant of the family Leguminosae include pigeon pea (scientific name: Cajanus cajan), adzuki bean (scientific name: Vigna angularis), wild soybean (scientific name: Glycine soja), and soybean (scientific name: Glycine max). Examples of the plant of the family Lythraceae include pomegranate (scientific name: Punica granatum). Examples of the plant of the family Betulaceae include white birch (scientific name: Betula platyphylla). The allergy can produce an allergic reaction upon contact with an antigen or consumption of the antigen. Here, the contact refers to touch to an object and, particularly, as for the human body, refers to attachment to the skin, the mucosa (eyes, lips, etc.) or the like. The consumption refers to incorporation into the body and refers to incorporation by inhalation or through an oral route. In general, allergic reactions caused by consumption of foods are particularly referred to as food allergies. In a preferred mode, the allergy may be a food allergy.

[0595] As referred to herein, the “allergy to soybean” refers to the state in which an individual has an allergic reaction caused by proteins, etc. present in soybean which act as an antigen.

[0596] As referred to herein, the “antigen” refers to a substance that provokes an allergic reaction, and is also referred to as an “allergen component”. The antigen is preferably a protein.

[0597] As referred to herein, the “protein” refers to a molecule having a structure in which naturally occurring amino acids are joined together by peptide bond. The number of amino acids present in a protein is not particularly limited. As referred to herein, the term “polypeptide” also means a molecule having a structure in which naturally occurring amino acids are joined together by peptide bond. The number of amino acids present in a polypeptide is not particularly limited. The “polypeptide” conceptually includes the “protein”. Also, polypeptides having about 2 to 50 amino acids joined together by peptide bond are in some cases called “peptides”, especially. In the case where amino acids can form different enantiomers, the amino acids are understood to form an L-enantiomer, unless otherwise indicated. The amino acid sequences of proteins, polypeptides, or peptides as used herein are represented by one-letter symbols of amino acids in accordance with standard usage and the notational convention commonly used in the art. The leftward direction represents the amino-terminal direction, and the rightward direction represents the carboxy-terminal direction. In the one-letter symbols of amino acids, X can be any substance having an amino group and a carboxyl group that can bind to amino acids at both ends, and particularly represents that any of 20 types of naturally occurring amino acids are acceptable.

[0598] Identification of Antigens

[0599] Proteins contained in soybean were analyzed by the aforementioned technique to identify causative antigens of an allergy to soybean. To be specific, soybean proteins were subjected to two-dimensional electrophoresis under the conditions described below.

[0600] The electrophoresis in the first dimension was isoelectric focusing, which was performed using isoelectric focusing gels with a gel-strip length of 5 to 10 cm and a gel pH range of 3 to 10. The pH gradient of the gels in the direction of electrophoresis was as follows: when the total gel-strip length is taken as 1, the gel-strip length up to pH 5 is taken as “a”, the gel-strip length from pH 5 to 7 is taken as “b”, and the gel-strip length above pH 7 is taken as “c”, “a” is in the range of 0.15 to 0.3, “b” is in the range of 0.4 to 0.7, and “c” is in the range of 0.15 to 0.3. More specifically, the isoelectric focusing was performed using the IPG gels, Immobiline Drystrip (pH3-10NL), produced by GE Healthcare Bio-Sciences Corporation (hereinafter abbreviated as “GE”). The electrophoresis system used was IPGphor produced by GE. The maximum current of the electrophoresis system was limited to 75 μA per gel strip. The voltage program adopted to perform the first-dimensional isoelectric focusing was as follows: (1) a constant voltage step was performed at a constant voltage of 300 V until the volt-hours reached 750 Vhr (the current variation width during electrophoresis for 30 minutes before the end of this step was 5 μA); (2) the voltage was increased gradually to 1000 V for 300 Vhr; (3) the voltage was further increased gradually to 5000 V for 4500 Vhr; and then (4) the voltage was held at a constant voltage of 5000 V until the total Vhr reached 12000.

[0601] The electrophoresis in the second dimension was SDS-PAGE, which was performed using polyacrylamide gels whose gel concentration at the distal end in the direction of electrophoresis was set to 3 to 6% and whose gel concentration at the proximal end was set to a higher value than that at the distal end. More specifically, the SDS-PAGE was performed using NuPAGE 4-12% Bris-Tris Gels (IPG well, Mini, 1 mm) produced by Life Technologies. The electrophoresis system used was XCell SureLock Mini-Cell produced by Life Technologies. The electrophoresis was run at a constant voltage of 200 V for about 45 minutes using an electrophoresis buffer composed of 50 mM MOPS, 50 mM Tris base, 0.1% (w/v) SDS and 1 mM EDTA.

[0602] As a result, the following spots in a two-dimensional electrophoresis gel run under the conditions described above for proteins in soybean have been revealed to exhibit specific binding to IgE antibodies from soybean-allergic patients.
[0603] Spot 1α: Molecular weight 70 to 120 kDa, pI 2.5 to 6.5
[0604] Spot 2α: Molecular weight 50 to 120 kDa, pI 2.5 to 6.5
[0605] Spot 4α: Molecular weight 70 to 120 kDa, pI 3.5 to 7.5
[0606] Spot 5α: Molecular weight 70 to 170 kDa, pI 3.5 to 7.5
[0607] Spot 6α: Molecular weight 70 to 120 kDa, pI 3.5 to 7.5
[0608] Spot 7α: Molecular weight 50 to 120 kDa, pI 3.5 to 7.5
[0609] Spot 8α: Molecular weight 50 to 120 kDa, pI 3.5 to 8.5
[0610] Spot 9α: Molecular weight 50 to 120 kDa, pI 3.5 to 8.5
[0611] Spot 10α: Molecular weight 30 to 90 kDa, pI 3.5 to 7.5
[0612] Spot 11α: Molecular weight 30 to 90 kDa, pI 3.5 to 8.5
[0613] Spot 12α: Molecular weight 30 to 90 kDa, pI 3.5 to 8.5
[0614] Spot 13α: Molecular weight 30 to 90 kDa, pI 3.5 to 7.5
[0615] Spot 14α: Molecular weight 30 to 90 kDa, pI 2.5 to 6.5
[0616] Spot 15═, 16α: Molecular weight 20 to 90 kDa, pI 3.5 to 7.5
[0617] Spot 17α: Molecular weight 20 to 90 kDa, pI 3.5 to 7.5
[0618] Spot 18α: Molecular weight 30 to 90 kDa, pI 3.5 to 8.5
[0619] Spot 19α: Molecular weight 30 to 90 kDa, pI 3.5 to 8.5
[0620] Spot 25α: Molecular weight 20 to 90 kDa, pI 3.5 to 7.5
[0621] Spot 26α: Molecular weight 20 to 90 kDa, pI 3.5 to 7.5
[0622] Spot 27α: Molecular weight 20 to 90 kDa, pI 3.5 to 7.5
[0623] Spot 28α: Molecular weight 10 to 70 kDa, pI 3.5 to 7.5
[0624] Spot 29α, 30α, 31α, 32α, 33α: Molecular weight 10 to 70 kDa, pI 3.5 to 8.5
[0625] Spot 34α: Molecular weight 10 to 70 kDa, pI 5.5 to 10.5
[0626] Spot 35α: Molecular weight 20 to 90 kDa, pI 5.5 to 10.5
[0627] Spot 36α, 37α: Molecular weight 10 to 70 kDa, pI 3.5 to 8.5
[0628] Spot 38α: Molecular weight 70 to 170 kDa, pI 5.5 to 10.5
[0629] Spot 39α: Molecular weight 5 to 60 kDa, pI 5.5 to 10.5
[0630] Spot 40α, 56α: Molecular weight 5 to 60 kDa, pI 5.5 to 10.5
[0631] Spot 41α: Molecular weight 5 to 60 kDa, pI 5.5 to 10.5
[0632] Spot 42α, 43α: Molecular weight 5 to 60 kDa, pI 5.5 to 10.5
[0633] Spot 45α: Molecular weight 2 to 50 kDa, pI 3.5 to 7.5
[0634] Spot 46α: Molecular weight 2 to 50 kDa, pI 3.5 to 7.5
[0635] Spot 47α: Molecular weight 5 to 50 kDa, pI 3.5 to 7.5
[0636] Spot 48α: Molecular weight 2 to 50 kDa, pI 3.5 to 8.5
[0637] Spot 50α: Molecular weight 2 to 50 kDa, pI 2.5 to 6.5
[0638] Spot 51α: Molecular weight 5 to 60 kDa, pI 2.5 to 6.5
[0639] Spot 52α: Molecular weight 10 to 70 kDa, pI 3.5 to 7.5
[0640] Spot 53α: Molecular weight 5 to 60 kDa, pI 3.5 to 8.5
[0641] Spot 54α: Molecular weight 5 to 60 kDa, pI 3.5 to 8.5
[0642] Spot 55α: Molecular weight 30 to 90 kDa, pI 5.5 to 10.5

[0643] Antigen

### (1α) Antigen in Spot 1α

[0644] As the result of sequence identification of the antigen in spot 1α by mass spectroscopy, the amino acid sequences of SEQ ID NOs: 7-104 were detected.

[0645] Also, the mass spectroscopic data obtained for spot 1α on a mass spectrometer was analyzed by comparing the data against the NCBI protein data, and as a result, endoplasmin homolog isoform X2 (amino acid sequence: SEQ ID NO: 70, encoding nucleotide sequence: SEQ ID NO: 69) was identified as a protein comprising any of SEQ ID NOs: 71 to 87 and endoplasmin homolog isoform X2 (amino acid sequence: SEQ ID NO: 89, encoding nucleotide sequence: SEQ ID NO: 88) was identified as a protein comprising any of SEQ ID NOs: 90 to 104.

[0646] Accordingly, the antigen in spot 1α in the present invention can be any of proteins selected from the group consisting of the proteins as defined below in (1αA1-a) to (1αA1-e), (1αB1), (1αA2-a) to (1αA2-e), and (1αB2):
[0647] (1αA1-α) a protein comprising an amino acid sequence with deletion, substitution, insertion or addition of one or several amino acids in SEQ ID NO: 70;
[0648] (1αA1-b) a protein comprising an amino acid sequence having at least 70%, preferably at least 75%, at least 80%, at least 85%, at least 90%, at least 95%, at least 97%, at least 98%, or at least 99% identity to the amino acid sequence of SEQ ID NO: 70;
[0649] (1αA1-c) a protein comprising an amino acid sequence encoded by a nucleotide sequence with deletion, substitution, insertion or addition of one or several nucleotides in SEQ ID NO: 69;
[0650] (1αA1-d) a protein comprising an amino acid sequence encoded by a nucleotide sequence having at least 70%, preferably at least 75%, at least 80%, at least 85%, at least 90%, at least 95%, at least 97%, at least 98%, or at least 99% identity to the nucleotide sequence of SEQ ID NO: 69;
[0651] (1αA1-e) a protein comprising an amino acid sequence encoded by a nucleic acid that hybridizes under stringent conditions with a nucleic acid having a nucleotide sequence complementary to the nucleotide sequence of SEQ ID NO: 69;
[0652] (1αB1) a protein comprising at least one amino acid sequence selected from the group consisting of SEQ ID NOs: 71-87, preferably a protein comprising at least 2, 3, 4, 5, 6, 7, 8, 9, 10, 11, 12, 13, 14, 15, or 16 or all sequences of the amino acid sequences. As referred to above, the amino acid sequence of any of SEQ ID NOs: 71 to 87 may be an amino acid sequence derived therefrom by deletion, substitution, insertion or addition of one or several amino acids;
[0653] (1αA2-a) a protein comprising an amino acid sequence with deletion, substitution, insertion or addition of one or several amino acids in SEQ ID NO: 89;
[0654] (1αA2-b) a protein comprising an amino acid sequence having at least 70%, preferably at least 75%, at least 80%, at least 85%, at least 90%, at least 95%, at least 97%, at least 98%, or at least 99% identity to the amino acid sequence of SEQ ID NO: 89;
[0655] (1αA2-c) a protein comprising an amino acid sequence encoded by a nucleotide sequence with deletion, substitution, insertion or addition of one or several nucleotides in SEQ ID NO: 88;
[0656] (1αA2-d) a protein comprising an amino acid sequence encoded by a nucleotide sequence having at least 70%, preferably at least 75%, at least 80%, at least 85%, at least 90%, at least 95%, at least 97%, at least 98%, or at least 99% identity to the nucleotide sequence of SEQ ID NO: 88;
[0657] (1αA2-e) a protein comprising an amino acid sequence encoded by a nucleic acid that hybridizes under stringent conditions with a nucleic acid having a nucleotide sequence complementary to the nucleotide sequence of SEQ ID NO: 88;
[0658] (1αB2) a protein comprising at least one amino acid sequence selected from the group consisting of SEQ ID NOs: 90-104, preferably a protein comprising at least 2, 3, 4, 5, 6, 7, 8, 9, 10, 11, 12, 13, or 14 or all sequences of the amino acid sequences. As referred to above, the amino acid sequence of any of SEQ ID NOs: 71 to 87 may be an amino acid sequence derived therefrom by deletion, substitution, insertion or addition of one or several amino acids.

[0659] The protein selected from the group consisting of the proteins as defined above in (1αA1-a) to (1αA1-e), (1αB1), (1αA2-a) to (1αA2-e), and (1αB2) can be proteins that are found in a protein spot with a molecular weight of around 70 to 120 kDa, preferably around 80 to 110 kDa, and an isoelectric point of 2.5 to 6.5, preferably 3.0 to 6.0 on gels used in the two-dimensional electrophoresis performed under the conditions described above in the subsection titled “Identification of antigens”.

[0660] Epitopes of the aforementioned antigens (1αA1-a) to (1αA1-e) and (1αB1) reside in amino acids 546-553 (SEQ ID NO: 652), amino acids 653-661 (SEQ ID NO: 655), amino acids 781-795 (SEQ ID NO: 657), amino acids 252-266 (SEQ ID NO: 658), amino acids 771-785 (SEQ ID NO: 659), and amino acids 493-502 (SEQ ID NO: 660) of SEQ ID NO: 70. When the antigen in spot la contains a variation in the amino acid sequence of SEQ ID NO: 70, amino acids at positions corresponding to the region of at least one of these epitopes may retain the sequence in SEQ ID NO: 70.

[0661] From the viewpoint of improving sensitivity (a degree to which a patient can be diagnosed as being positive) or specificity (a degree to which a healthy subject is not diagnosed as being positive), the antigen in spot la may be the following variant.

[0662] In the epitope having the sequence of SEQ ID NO: 652, sites of amino acids other than X in SEQ ID NO: 650 or 651 are important for binding to IgE antibodies from allergic patients. Thus, in another preferred mode, when the antigen in spot 1α contains a variation in the amino acids of SEQ ID NO: 70, amino acids 546-553 of SEQ ID NO: 70 in this antigen may have the amino acid sequence of SEQ ID NO: 650 or 651.

[0663] In the epitope having the sequence of SEQ ID NO: 655, sites of amino acids other than X in SEQ ID NO: 653 or 654 are important for binding to IgE antibodies from allergic patients. Thus, in another preferred mode, when the antigen in spot la contains a variation in the amino acid sequence of SEQ ID NO: 70, amino acids 653-661 of SEQ ID NO: 70 in this antigen may have the amino acid sequence of SEQ ID NO: 653 or 654.

[0664] In the epitope having the sequence of SEQ ID NO: 657, sites of amino acids other than X in SEQ ID NO: 656 are important for binding to IgE antibodies from allergic patients. Thus, in another preferred mode, when the antigen in spot 1α contains a variation in the amino acid sequence of SEQ ID NO: 70, amino acids 781-795 of SEQ ID NO: 70 in this antigen may have the amino acid sequence of SEQ ID NO: 656.

[0665] Preferably, a protein that is an antigen in spot 1α has activity equivalent to that of the protein having the amino acid sequence of SEQ ID NO: 70 or 89 (endoplasmin homolog isoform X2) or causative of an allergy to soybean.

[0666] (2α) Antigen in Spot 2α

[0667] As the result of sequence identification of the antigen in spot 2α by mass spectroscopy, the amino acid sequences of SEQ ID NOs: 107-153 were detected.

[0668] Also, the mass spectroscopic data obtained for spot 2α on a mass spectrometer was analyzed by comparing the data against the NCBI protein data, and as a result, heat shock cognate protein 80 (amino acid sequence: SEQ ID NO: 106, encoding nucleotide sequence: SEQ ID NO: 105) was identified as a protein comprising any of SEQ ID NOs: 107 to 120, heat shock protein 90-1 (amino acid sequence: SEQ ID NO: 122, encoding nucleotide sequence: SEQ ID NO: 121) was identified as a protein comprising any of SEQ ID NOs: 123 to 137, and hypothetical protein GLYMA_02G302500 was identified as a protein comprising any of SEQ ID NOs: 140 to 153.

[0669] Accordingly, the antigen in spot la in the present invention can be any of proteins selected from the group consisting of the proteins as defined below in (2αA1-a) to (2αA1-e), (2αB1), (2αA2-a) to (2αA2-e), (2αB2), (2αA3-a) to (2αA3-e), and (2αB3): (2αA1-α) a protein comprising an amino acid sequence with deletion, substitution, insertion or addition of one or several amino acids in SEQ ID NO: 106;
[0670] (2αA1-b) a protein comprising an amino acid sequence having at least 70%, preferably at least 75%, at least 80%, at least 85%, at least 90%, at least 95%, at least 97%, at least 98%, or at least 99% identity to the amino acid sequence of SEQ ID NO: 106;
[0671] (2αA1-c) a protein comprising an amino acid sequence encoded by a nucleotide sequence with deletion, substitution, insertion or addition of one or several nucleotides in SEQ ID NO: 105;
[0672] (2αA1-d) a protein comprising an amino acid sequence encoded by a nucleotide sequence having at least 70%, preferably at least 75%, at least 80%, at least 85%, at least 90%, at least 95%, at least 97%, at least 98%, or at least 99% identity to the nucleotide sequence of SEQ ID NO: 105;
[0673] (2αA1-e) a protein comprising an amino acid sequence encoded by a nucleic acid that hybridizes under stringent conditions with a nucleic acid having a nucleotide sequence complementary to the nucleotide sequence of SEQ ID NO: 105;
[0674] (2αB 1) a protein comprising at least one amino acid sequence selected from the group consisting of SEQ ID NOs: 107-120, preferably a protein comprising at least 2, 3, 4, 5, 6, 7, 8, 9, 10, 11, 12, or 13 or all sequences of the amino acid sequences. As referred to above, the amino acid sequence of any of SEQ ID NOs: 107 to 120 may be an amino acid sequence derived therefrom by deletion, substitution, insertion or addition of one or several amino acids;
[0675] (2αA2-a) a protein comprising an amino acid sequence with deletion, substitution, insertion or addition of one or several amino acids in SEQ ID NO: 122;
[0676] (2αA2-b) a protein comprising an amino acid sequence having at least 70%, preferably at least 75%, at least 80%, at least 85%, at least 90%, at least 95%, at least 97%, at least 98%, or at least 99% identity to the amino acid sequence of SEQ ID NO: 122;
[0677] (2αA2-c) a protein comprising an amino acid sequence encoded by a nucleotide sequence with deletion, substitution, insertion or addition of one or several nucleotides in SEQ ID NO: 121;
[0678] (2αA2-d) a protein comprising an amino acid sequence encoded by a nucleotide sequence having at least 70%, preferably at least 75%, at least 80%, at least 85%, at least 90%, at least 95%, at least 97%, at least 98%, or at least 99% identity to the nucleotide sequence of SEQ ID NO: 121;
[0679] (2αA2-e) a protein comprising an amino acid sequence encoded by a nucleic acid that hybridizes under stringent conditions with a nucleic acid having a nucleotide sequence complementary to the nucleotide sequence of SEQ ID NO: 121;
[0680] (2αB2) a protein comprising at least one amino acid sequence selected from the group consisting of SEQ ID NOs: 123-137, preferably a protein comprising at least 2, 3, 4, 5, 6, 7, 8, 9, 10, 11, 12, 13, or 14 or all sequences of the amino acid sequences. As referred to above, the amino acid sequence of any of SEQ ID NOs: 123 to 137 may be an amino acid sequence derived therefrom by deletion, substitution, insertion or addition of one or several amino acids.
[0681] (2αA3-a) a protein comprising an amino acid sequence with deletion, substitution, insertion or addition of one or several amino acids in SEQ ID NO: 139;
[0682] (2αA3-b) a protein comprising an amino acid sequence having at least 70%, preferably at least 75%, at least 80%, at least 85%, at least 90%, at least 95%, at least 97%, at least 98%, or at least 99% identity to the amino acid sequence of SEQ ID NO: 139;
[0683] (2αA3-c) a protein comprising an amino acid sequence encoded by a nucleotide sequence with deletion, substitution, insertion or addition of one or several nucleotides in SEQ ID NO: 138;
[0684] (2αA3-d) a protein comprising an amino acid sequence encoded by a nucleotide sequence having at least 70%, preferably at least 75%, at least 80%, at least 85%, at least 90%, at least 95%, at least 97%, at least 98%, or at least 99% identity to the nucleotide sequence of SEQ ID NO: 138;
[0685] (2αA3-e) a protein comprising an amino acid sequence encoded by a nucleic acid that hybridizes under stringent conditions with a nucleic acid having a nucleotide sequence complementary to the nucleotide sequence of SEQ ID NO: 138;
[0686] (2αB3) a protein comprising at least one amino acid sequence selected from the group consisting of SEQ ID NOs: 140-153, preferably a protein comprising at least 2, 3, 4, 5, 6, 7, 8, 9, 10, 11, 12, or 13 or all sequences of the amino acid sequences. As referred to above, the amino acid sequence of any of SEQ ID NOs: 140 to 153 may be an amino acid sequence derived therefrom by deletion, substitution, insertion or addition of one or several amino acids.

[0687] The protein selected from the group consisting of the proteins as defined above in (2αA1-α) to (2αA1-e), (2αB1), (2αA2-a) to (2αA2-e), (2αB2), (2αA3-a) to (2αA3-e), and (2αB3) can be proteins that are found in a protein spot with a molecular weight of around 50 to 120 kDa, preferably around 60 to 110 kDa, and an isoelectric point of 2.5 to 6.5, preferably 3.0 to 6.0 on gels used in the two-dimensional electrophoresis performed under the conditions described above in the subsection titled “Identification of antigens”.

[0688] Epitopes of the aforementioned antigens (2αA1-a) to (2αA1-e) and (2αB1) reside in amino acids 42-50 (SEQ ID NO: 663), amino acids 51-65 (SEQ ID NO: 666), amino acids 69-73 (SEQ ID NO: 669), amino acids 221-235 (SEQ ID NO: 670), amino acids 351-365 (SEQ ID NO: 671), amino acids 361-375 (SEQ ID NO: 672), amino acids 411-425 (SEQ ID NO: 675), amino acids 551-565 (SEQ ID NO: 676), amino acids 671-685 (SEQ ID NO: 677), amino acids 681-695 (SEQ ID NO: 678), amino acids 41-55 (SEQ ID NO: 681), amino acids 451-465 (SEQ ID NO: 684), amino acids 271-285 (SEQ ID NO: 689), amino acids 51-59 (SEQ ID NO: 690), amino acids 65-72 (SEQ ID NO: 691),and amino acids 453-460 (SEQ ID NO: 692) of SEQ ID NO: 106. When the antigen in spot 2α contains a variation in the amino acid sequence of SEQ ID NO: 106, amino acids at positions corresponding to the region of at least one of these epitopes may retain the sequence in SEQ ID NO: 106.

[0689] From the viewpoint of improving sensitivity (a degree to which a patient can be diagnosed as being positive) or specificity (a degree to which a healthy subject is not diagnosed as being positive), the antigen in spot 2α may be the following variant.

[0690] In the epitope having the sequence of SEQ ID NO: 663, sites of amino acids other than X in SEQ ID NO: 661 or 662 are important for binding to IgE antibodies from allergic patients. Thus, in another preferred mode, when the antigen in spot 2α contains a variation in the amino acid sequence of SEQ ID NO: 106, amino acids 42-50 of SEQ ID NO: 106 in this antigen may have the amino acid sequence of SEQ ID NO: 661 or 662.

[0691] In the epitope having the sequence of SEQ ID NO: 666, sites of amino acids other than X in SEQ ID NO: 664 or 665 are important for binding to IgE antibodies from allergic patients. Thus, in another preferred mode, when the antigen in spot 2α contains a variation in the amino acid sequence of SEQ ID NO: 106, amino acids 51-65 of SEQ ID NO: 106 in this antigen may have the amino acid sequence of SEQ ID NO: 664 or 665.

[0692] In the epitope having the sequence of SEQ ID NO: 669, sites of amino acids other than X in SEQ ID NO: 667 or 668 are important for binding to IgE antibodies from allergic patients. Thus, in another preferred mode, when the antigen in spot 2α contains a variation in the amino acid sequence of SEQ ID NO: 106, amino acids 69-73 of SEQ ID NO: 106 in this antigen may have the amino acid sequence of SEQ ID NO: 667 or 668.

[0693] In the epitope having the sequence of SEQ ID NO: 675, sites of amino acids other than X in SEQ ID NO: 673 or 674 are important for binding to IgE antibodies from allergic patients. Thus, in another preferred mode, when the antigen in spot 2α contains a variation in the amino acid sequence of SEQ ID NO: 106, amino acids 411-425 of SEQ ID NO: 106 in this antigen may have the amino acid sequence of SEQ ID NO: 673 or 674.

[0694] In the epitope having the sequence of SEQ ID NO: 681, sites of amino acids other than X in SEQ ID NO: 679 or 680 are important for binding to IgE antibodies from allergic patients. Thus, in another preferred mode, when the antigen in spot 2α contains a variation in the amino acid sequence of SEQ ID NO: 106, amino acids 41-55 of SEQ ID NO: 106 in this antigen may have the amino acid sequence of SEQ ID NO: 679 or 680.

[0695] In the epitope having the sequence of SEQ ID NO: 684, sites of amino acids other than X in SEQ ID NO: 682 or 685 are important for binding to IgE antibodies from allergic patients. Thus, in another preferred mode, when the antigen in spot 2α contains a variation in the amino acid sequence of SEQ ID NO: 106, amino acids 451-465 of SEQ ID NO: 106 in this antigen may have the amino acid sequence of SEQ ID NO: 682 or 685.

[0696] In the epitope having the sequence of SEQ ID NO: 689, sites of amino acids other than X in SEQ ID NO: 688 are important for binding to IgE antibodies from allergic patients. Thus, in another preferred mode, when the antigen in spot 2α contains a variation in the amino acid sequence of SEQ ID NO: 106, amino acids 271-285 of SEQ ID NO: 106 in this antigen may have the amino acid sequence of SEQ ID NO: 688.

[0697] Preferably, a protein that is an antigen in spot 2α has activity equivalent to that of the protein having the amino acid sequence of SEQ ID NO: 106 (heat shock cognate protein 80), the protein having the amino acid sequence of SEQ ID NO: 122 (heat shock protein 90-1), or the protein having the amino acid sequence of SEQ ID NO: 139 (hypothetical protein GLYMA_02G302500), or causative of an allergy to soybean.

[0698] (4α) Antigen in Spot 4α

[0699] As the result of sequence identification of the antigen in spot 4α by mass spectroscopy, the amino acid sequences of SEQ ID NOs: 156 and 157 were detected.

[0700] Also, the mass spectroscopic data obtained for spot 4α on a mass spectrometer was analyzed by comparing the data against the NCBI protein data, and as a result, embryo-specific urease isoform X1 (amino acid sequence: SEQ ID NO: 155, encoding nucleotide sequence: SEQ ID NO: 154) was identified as a protein comprising SEQ ID NO: 156 or 157.

[0701] Accordingly, the antigens in spot 4α in the present invention can be any protein selected from the group consisting of the proteins as defined below in (4αA-a) to (4αA-e) and (4αB):
[0702] (4αA-a) a protein comprising an amino acid sequence with deletion, substitution, insertion or addition of one or several amino acids in SEQ ID NO: 155;
[0703] (4αA-b) a protein comprising an amino acid sequence having at least 70%, preferably at least 75%, at least 80%, at least 85%, at least 90%, at least 95%, at least 97%, at least 98%, or at least 99% identity to the amino acid sequence of SEQ ID NO: 155;
[0704] (4αA-c) a protein comprising an amino acid sequence encoded by a nucleotide sequence with deletion, substitution, insertion or addition of one or several nucleotides in SEQ ID NO: 154;
[0705] (4αA-d) a protein comprising an amino acid sequence encoded by a nucleotide sequence having at least 70%, preferably at least 75%, at least 80%, at least 85%, at least 90%, at least 95%, at least 97%, at least 98%, or at least 99% identity to the nucleotide sequence of SEQ ID NO: 154;
[0706] (4αA-e) a protein comprising an amino acid sequence encoded by a nucleic acid that hybridizes under stringent conditions with a nucleic acid having a nucleotide sequence complementary to the nucleotide sequence of SEQ ID NO: 154;
[0707] (4αB) a protein comprising at least one amino acid sequence selected from the group consisting of SEQ ID NOs: 156 and 157, preferably a protein comprising both the amino acid sequences. As referred to above, the amino acid sequence of any of SEQ ID NOs: 156 and 157 may be an amino acid sequence derived therefrom by deletion, substitution, insertion or addition of one or several amino acids.

[0708] The proteins selected from the group consisting of (4αA-a) to (4αA-e) and (4αB) as defined above can be proteins that are found in a protein spot with a molecular weight of around 70 to 120 kDa, preferably around 80 to 110 kDa and an isoelectric point of 3.5 to 7.5, preferably 4.0 to 7.0 on gels used in the two-dimensional electrophoresis performed under the conditions described above in the subsection titled “Identification of antigens”.

[0709] Epitopes of the antigen in spot 4α reside in amino acids 121-130 (SEQ ID NO: 719), amino acids 289-295 (SEQ ID NO: 722), amino acids 293-302 (SEQ ID NO: 725), amino acids 501-515 (SEQ ID NO: 726), amino acids 571-585 (SEQ ID NO: 727), amino acids 591-605 (SEQ ID NO: 728), and amino acids 771-785 (SEQ ID NO: 731) of SEQ ID NO: 155. The antigen in spot 4α may retain the sequence in SEQ ID NO: 155 as to amino acids at positions corresponding to the region of at least one of these epitopes.

[0710] From the viewpoint of improving sensitivity (a degree to which a patient can be diagnosed as being positive) or specificity (a degree to which a healthy subject is not diagnosed as being positive), the antigen in spot 4α may be the following variant.

[0711] In the epitope having the sequence of SEQ ID NO: 719, sites of amino acids other than X in SEQ ID NO: 717 or 718 are important for binding to IgE antibodies from allergic patients. Thus, in another preferred mode, amino acids 121-130 of SEQ ID NO: 155 in the antigen in spot 4α may have the amino acid sequence of SEQ ID NO: 717 or 718.

[0712] In the epitope having the sequence of SEQ ID NO: 722, sites of amino acids other than X in SEQ ID NO: 720 or 721 are important for binding to IgE antibodies from allergic patients. Thus, in another preferred mode, amino acids 289-295 of SEQ ID NO: 155 in the antigen in spot 4α may have the amino acid sequence of SEQ ID NO: 720 or 721.

[0713] In the epitope having the sequence of SEQ ID NO: 725, sites of amino acids other than X in SEQ ID NO: 723 or 724 are important for binding to IgE antibodies from allergic patients. Thus, in another preferred mode, amino acids 293-302 of SEQ ID NO: 155 in the antigen in spot 4α may have the amino acid sequence of SEQ ID NO: 723 or 724.

[0714] In the epitope having the sequence of SEQ ID NO: 731, sites of amino acids other than X in SEQ ID NO: 729 or 730 are important for binding to IgE antibodies from allergic patients. Thus, in another preferred mode, amino acids 771-785 of SEQ ID NO: 155 in the antigen in spot 4α may have the amino acid sequence of SEQ ID NO: 729 or 730.

[0715] Preferably, a protein that is an antigen in spot 4α has activity equivalent to that of the protein having the amino acid sequence of SEQ ID NO: 155 (embryo-specific urease isoform X1) or causative of an allergy to soybean.

[0716] (5α) Antigen in Spot 5α

[0717] As the result of sequence identification of the antigen in spot 5α by mass spectroscopy, the amino acid sequences of SEQ ID NOs: 160 and 161 were detected.

[0718] Also, the mass spectroscopic data obtained for spot 5α on a mass spectrometer was analyzed by comparing the data against the NCBI protein data, and as a result, alpha-1,4 glucan phosphorylase L isozyme, chloroplastic/amyloplastic (amino acid sequence: SEQ ID NO: 159, encoding nucleotide sequence: SEQ ID NO: 158) was identified as a protein comprising SEQ ID NO: 160 or 161.

[0719] Accordingly, the antigens in spot 5α in the present invention can be any protein selected from the group consisting of the proteins as defined below in (5αA-a) to (5αA-e) and (5αB):
[0720] (5αA-a) a protein comprising an amino acid sequence with deletion, substitution, insertion or addition of one or several amino acids in SEQ ID NO: 159;
[0721] (5αA-b) a protein comprising an amino acid sequence having at least 70%, preferably at least 75%, at least 80%, at least 85%, at least 90%, at least 95%, at least 97%, at least 98%, or at least 99% identity to the amino acid sequence of SEQ ID NO: 159;
[0722] (5αA-c) a protein comprising an amino acid sequence encoded by a nucleotide sequence with deletion, substitution, insertion or addition of one or several nucleotides in SEQ ID NO: 158;
[0723] (5αA-d) a protein comprising an amino acid sequence encoded by a nucleotide sequence having at least 70%, preferably at least 75%, at least 80%, at least 85%, at least 90%, at least 95%, at least 97%, at least 98%, or at least 99% identity to the nucleotide sequence of SEQ ID NO: 158;
[0724] (5αA-e) a protein comprising an amino acid sequence encoded by a nucleic acid that hybridizes under stringent conditions with a nucleic acid having a nucleotide sequence complementary to the nucleotide sequence of SEQ ID NO: 158;
[0725] (5αB) a protein comprising at least one amino acid sequence selected from the group consisting of SEQ ID NOs: 160 and 161, preferably a protein comprising both the amino acid sequences. As referred to above, the amino acid sequence of any of SEQ ID NOs: 160 and 161 may be an amino acid sequence derived therefrom by deletion, substitution, insertion or addition of one or several amino acids.

[0726] The proteins selected from the group consisting of (5αA-a) to (5αA-e) and (5αB) as defined above can be proteins that are found in a protein spot with a molecular weight of around 70 to 170 kDa, preferably around 80 to 160 kDa and an isoelectric point of 3.5 to 7.5, preferably 4.0 to 7.0 on gels used in the two-dimensional electrophoresis performed under the conditions described above in the subsection titled “Identification of antigens”.

[0727] Epitopes of the antigen in spot 5α reside in amino acids 861-875 (SEQ ID NO: 734), amino acids 871-885 (SEQ ID NO: 735), amino acids 891-905 (SEQ ID NO: 736), amino acids 901-915 (SEQ ID NO: 737), and amino acids 951-965 (SEQ ID NO: 738) of SEQ ID NO: 159. The antigen in spot 5α may retain the sequence in SEQ ID NO: 159 as to amino acids at positions corresponding to the region of at least one of these epitopes.

[0728] From the viewpoint of improving sensitivity (a degree to which a patient can be diagnosed as being positive) or specificity (a degree to which a healthy subject is not diagnosed as being positive), the antigen in spot 5α may be the following variant.

[0729] In the epitope having the sequence of SEQ ID NO: 734, sites of amino acids other than X in SEQ ID NO: 732 or 733 are important for binding to IgE antibodies from allergic patients. Thus, in another preferred mode, amino acids 861-875 of SEQ ID NO: 159 in the antigen in spot 5α may have the amino acid sequence of SEQ ID NO: 732 or 733.

[0730] Preferably, a protein that is an antigen in spot 5α has activity equivalent to that of the protein having the amino acid sequence of SEQ ID NO: 159 (alpha-1,4 glucan phosphorylase L isozyme, chloroplastic/amyloplastic) or causative of an allergy to soybean.

[0731] (6α) Antigen in Spot 6α

[0732] As the result of sequence identification of the antigen in spot 6α by mass spectroscopy, the amino acid sequences of SEQ ID NOs: 164-172 were detected.

[0733] Also, the mass spectroscopic data obtained for spot 6α on a mass spectrometer was analyzed by comparing the data against the NCBI protein data, and as a result, aconitate hydratase 1 (amino acid sequence: SEQ ID NO: 163, encoding nucleotide sequence: SEQ ID NO: 162) was identified as a protein comprising any of SEQ ID NOs: 164 to 167 and aconitate hydratase 1 (amino acid sequence: SEQ ID NO: 169, encoding nucleotide sequence: SEQ ID NO: 168) was identified as a protein comprising any of SEQ ID NOs: 170 to 172.

[0734] Accordingly, the antigen in spot 6α in the present invention can be any of proteins selected from the group consisting of the proteins as defined below in (6αA1-a) to (6αA1-e), (6αB1), (6αA2-a) to (6αA2-e), and (6αB2):
[0735] (6αA1-a) a protein comprising an amino acid sequence with deletion, substitution, insertion or addition of one or several amino acids in SEQ ID NO: 163;
[0736] (6αA1-b) a protein comprising an amino acid sequence having at least 70%, preferably at least 75%, at least 80%, at least 85%, at least 90%, at least 95%, at least 97%, at least 98%, or at least 99% identity to the amino acid sequence of SEQ ID NO: 163;
[0737] (6αA1-c) a protein comprising an amino acid sequence encoded by a nucleotide sequence with deletion, substitution, insertion or addition of one or several nucleotides in SEQ ID NO: 162;
[0738] (6αA1-d) a protein comprising an amino acid sequence encoded by a nucleotide sequence having at least 70%, preferably at least 75%, at least 80%, at least 85%, at least 90%, at least 95%, at least 97%, at least 98%, or at least 99% identity to the nucleotide sequence of SEQ ID NO: 162;
[0739] (6αA1-e) a protein comprising an amino acid sequence encoded by a nucleic acid that hybridizes under stringent conditions with a nucleic acid having a nucleotide sequence complementary to the nucleotide sequence of SEQ ID NO: 162;
[0740] (6αB1) a protein comprising at least one amino acid sequence selected from the group consisting of SEQ ID NOs: 164-167, preferably a protein comprising at least 2, 3, or all sequences of the amino acid sequences. As referred to above, the amino acid sequence of any of SEQ ID NOs: 164 to 167 may be an amino acid sequence derived therefrom by deletion, substitution, insertion or addition of one or several amino acids;
[0741] (6αA2-a) a protein comprising an amino acid sequence with deletion, substitution, insertion or addition of one or several amino acids in SEQ ID NO: 169;
[0742] (6αA2-b) a protein comprising an amino acid sequence having at least 70%, preferably at least 75%, at least 80%, at least 85%, at least 90%, at least 95%, at least 97%, at least 98%, or at least 99% identity to the amino acid sequence of SEQ ID NO: 169;
[0743] (6αA2-c) a protein comprising an amino acid sequence encoded by a nucleotide sequence with deletion, substitution, insertion or addition of one or several nucleotides in SEQ ID NO: 168;
[0744] (6αA2-d) a protein comprising an amino acid sequence encoded by a nucleotide sequence having at least 70%, preferably at least 75%, at least 80%, at least 85%, at least 90%, at least 95%, at least 97%, at least 98%, or at least 99% identity to the nucleotide sequence of SEQ ID NO: 168;
[0745] (6αA2-e) a protein comprising an amino acid sequence encoded by a nucleic acid that hybridizes under stringent conditions with a nucleic acid having a nucleotide sequence complementary to the nucleotide sequence of SEQ ID NO: 168;
[0746] (6αB2) a protein comprising at least one amino acid sequence selected from the group consisting of SEQ ID NOs: 170-172, preferably a protein comprising at least 2, or all sequences of the amino acid sequences. As referred to above, the amino acid sequence of any of SEQ ID NOs: 170 to 172 may be an amino acid sequence derived therefrom by deletion, substitution, insertion or addition of one or several amino acids.

[0747] The protein selected from the group consisting of the proteins as defined above in (6αA1-a) to (6αA1-e), (6αB1), (6αA2-a) to (6αA2-e), and (6αB2) can be proteins that are found in a protein spot with a molecular weight of around 70 to 120 kDa, preferably around 80 to 110 kDa, and an isoelectric point of 3.5 to 7.5, preferably 4.0 to 7.0 on gels used in the two-dimensional electrophoresis performed under the conditions described above in the subsection titled “Identification of antigens”.

[0748] Epitopes of the aforementioned antigens (6αA1-a) to (6αA1-e) and (6αB1) reside in amino acids 761-775 (SEQ ID NO: 739), amino acids 831-845 (SEQ ID NO: 740) of SEQ ID NO: 163. When the antigen in spot 6α contains a variation in the amino acid sequence of SEQ ID NO: 163, amino acids at positions corresponding to the region of at least one of these epitopes may retain the sequence in SEQ ID NO: 163.

[0749] Preferably, a protein that is an antigen in spot 6α has activity equivalent to that of the protein having the amino acid sequence of SEQ ID NO: 163 or 169 (aconitate hydratase 1) or causative of an allergy to soybean.

[0750] (7α) Antigen in Spot 7α

[0751] As the result of sequence identification of the antigen in spot 7α by mass spectroscopy, the amino acid sequences of SEQ ID NOs: 175-187 were detected.

[0752] Also, the mass spectroscopic data obtained for spot 7α on a mass spectrometer was analyzed by comparing the data against the NCBI protein data, and as a result, methionine synthase (amino acid sequence: SEQ ID NO: 174, encoding nucleotide sequence: SEQ ID NO: 173) was identified as a protein comprising any of SEQ ID NOs: 175 to 187.

[0753] Accordingly, the antigens in spot 7α in the present invention can be any protein selected from the group consisting of the proteins as defined below in (7αA-a) to (7αA-e) and (7αB):
[0754] (7αA-a) a protein comprising an amino acid sequence with deletion, substitution, insertion or addition of one or several amino acids in SEQ ID NO: 174;
[0755] (7αA-b) a protein comprising an amino acid sequence having at least 70%, preferably at least 75%, at least 80%, at least 85%, at least 90%, at least 95%, at least 97%, at least 98%, or at least 99% identity to the amino acid sequence of SEQ ID NO: 174;
[0756] (7αA-c) a protein comprising an amino acid sequence encoded by a nucleotide sequence with deletion, substitution, insertion or addition of one or several nucleotides in SEQ ID NO: 173;
[0757] (7αA-d) a protein comprising an amino acid sequence encoded by a nucleotide sequence having at least 70%, preferably at least 75%, at least 80%, at least 85%, at least 90%, at least 95%, at least 97%, at least 98%, or at least 99% identity to the nucleotide sequence of SEQ ID NO: 173;
[0758] (7αA-e) a protein comprising an amino acid sequence encoded by a nucleic acid that hybridizes under stringent conditions with a nucleic acid having a nucleotide sequence complementary to the nucleotide sequence of SEQ ID NO: 173;
[0759] (7αB) a protein comprising at least one amino acid sequence selected from the group consisting of SEQ ID NOs: 175-187, preferably a protein comprising at least 2, 3, 4, 5, 6, 7, 8, 9, 10, 11 or 12 or all sequences of the amino acid sequences. As referred to above, the amino acid sequence of any of SEQ ID NOs: 175-187 may be an amino acid sequence derived therefrom by deletion, substitution, insertion or addition of one or several amino acids.

[0760] The proteins selected from the group consisting of (7αA-a) to (7αA-e) and (7αB) as defined above can be proteins that are found in a protein spot with a molecular weight of around 50 to 120 kDa, preferably around 60 to 110 kDa and an isoelectric point of 3.5 to 7.5, preferably 4.0 to 7.0 on gels used in the two-dimensional electrophoresis performed under the conditions described above in the subsection titled “Identification of antigens”.

[0761] Epitopes of the antigen in spot 7α reside in amino acids 471-485 (SEQ ID NO: 741), amino acids 581-595 (SEQ ID NO: 744) of SEQ ID NO: 174. The antigen in spot 7α may retain the sequence in SEQ ID NO: 174 as to amino acids at positions corresponding to the region of at least one of these epitopes.

[0762] From the viewpoint of improving sensitivity (a degree to which a patient can be diagnosed as being positive) or specificity (a degree to which a healthy subject is not diagnosed as being positive), the antigen in spot 7α may be the following variant.

[0763] In the epitope having the sequence of SEQ ID NO: 744, sites of amino acids other than X in SEQ ID NO: 742 or 743 are important for binding to IgE antibodies from allergic patients. Thus, in another preferred mode, amino acids 581-595 of SEQ ID NO: 174 in the antigen in spot 7α may have the amino acid sequence of SEQ ID NO: 742 or 743.

[0764] Preferably, a protein that is an antigen in spot 7α has activity equivalent to that of the protein having the amino acid sequence of SEQ ID NO: 174 (methionine synthase) or causative of an allergy to soybean.

[0765] (8α) Antigen in Spot 8α

[0766] As the result of sequence identification of the antigen in spot 8α by mass spectroscopy, the amino acid sequences of SEQ ID NOs: 190-199 were detected.

[0767] Also, the mass spectroscopic data obtained for spot 8α on a mass spectrometer was analyzed by comparing the data against the NCBI protein data, and as a result, transketolase, chloroplastic (amino acid sequence: SEQ ID NO: 189, encoding nucleotide sequence: SEQ ID NO: 188) was identified as a protein comprising any of SEQ ID NOs: 190 to 199.

[0768] Accordingly, the antigens in spot 8α in the present invention can be any protein selected from the group consisting of the proteins as defined below in (8αA-a) to (8αA-e) and (8αB):
[0769] (8αA-a) a protein comprising an amino acid sequence with deletion, substitution, insertion or addition of one or several amino acids in SEQ ID NO: 189;
[0770] (8αA-b) a protein comprising an amino acid sequence having at least 70%, preferably at least 75%, at least 80%, at least 85%, at least 90%, at least 95%, at least 97%, at least 98%, or at least 99% identity to the amino acid sequence of SEQ ID NO: 189;
[0771] (8αA-c) a protein comprising an amino acid sequence encoded by a nucleotide sequence with deletion, substitution, insertion or addition of one or several nucleotides in SEQ ID NO: 188;
[0772] (8αA-d) a protein comprising an amino acid sequence encoded by a nucleotide sequence having at least 70%, preferably at least 75%, at least 80%, at least 85%, at least 90%, at least 95%, at least 97%, at least 98%, or at least 99% identity to the nucleotide sequence of SEQ ID NO: 188;
[0773] (8αA-e) a protein comprising an amino acid sequence encoded by a nucleic acid that hybridizes under stringent conditions with a nucleic acid having a nucleotide sequence complementary to the nucleotide sequence of SEQ ID NO: 188;
[0774] (8αB) a protein comprising at least one amino acid sequence selected from the group consisting of SEQ ID NOs: 190-199, preferably a protein comprising at least 2, 3, 4, 5, 6, 7, 8 or 9 or all sequences of the amino acid sequences. As referred to above, the amino acid sequence of any of SEQ ID NOs: 190-199 may be an amino acid sequence derived therefrom by deletion, substitution, insertion or addition of one or several amino acids.

[0775] The proteins selected from the group consisting of (8αA-a) to (8αA-e) and (8αB) as defined above can be proteins that are found in a protein spot with a molecular weight of around 50 to 120 kDa, preferably around 60 to 110 kDa and an isoelectric point of 3.5 to 8.5, preferably 4.0 to 8.0 on gels used in the two-dimensional electrophoresis performed under the conditions described above in the subsection titled “Identification of antigens”.

[0776] Preferably, a protein that is an antigen in spot 8α has activity equivalent to that of the protein having the amino acid sequence of SEQ ID NO: 189 (transketolase, chloroplastic) or causative of an allergy to soybean.

[0777] (9α) Antigen in Spot 9α

[0778] As the result of sequence identification of the antigen in spot 9α by mass spectroscopy, the amino acid sequence of SEQ ID NO: 202 was detected.

[0779] Also, the mass spectroscopic data obtained for spot 9α on a mass spectrometer was analyzed by comparing the data against the NCBI protein data, and as a result, lysine-tRNA ligase, cytoplasmic-like isoform X2 (amino acid sequence: SEQ ID NO: 201, encoding nucleotide sequence: SEQ ID NO: 200) was identified as a protein comprising SEQ ID NO: 202.

[0780] Accordingly, the antigens in spot 9α in the present invention can be any protein selected from the group consisting of the proteins as defined below in (9αA-a) to (9αA-e) and (9αB):
[0781] (9αA-a) a protein comprising an amino acid sequence with deletion, substitution, insertion or addition of one or several amino acids in SEQ ID NO: 201;
[0782] (9αA-b) a protein comprising an amino acid sequence having at least 70%, preferably at least 75%, at least 80%, at least 85%, at least 90%, at least 95%, at least 97%, at least 98%, or at least 99% identity to the amino acid sequence of SEQ ID NO: 201;
[0783] (9αA-c) a protein comprising an amino acid sequence encoded by a nucleotide sequence with deletion, substitution, insertion or addition of one or several nucleotides in SEQ ID NO: 200;
[0784] (9αA2-d) a protein comprising an amino acid sequence encoded by a nucleotide sequence having at least 70%, preferably at least 75%, at least 80%, at least 85%, at least 90%, at least 95%, at least 97%, at least 98%, or at least 99% identity to the nucleotide sequence of SEQ ID NO: 200;
[0785] (9αA-e) a protein comprising an amino acid sequence encoded by a nucleic acid that hybridizes under stringent conditions with a nucleic acid having a nucleotide sequence complementary to the nucleotide sequence of SEQ ID NO: 200;
[0786] (9αB) a protein comprising an amino acid sequence of SEQ ID NO: 202. As referred to above, the amino acid sequence(s) of SEQ ID NO: 202 may be an amino acid sequence(s) derived therefrom by deletion, substitution, insertion or addition of one or several amino acids.

[0787] The proteins selected from the group consisting of (9αA-a) to (9αA-e) and (9αB) as defined above can be proteins that are found in a protein spot with a molecular weight of around 50 to 120 kDa, preferably around 60 to 110 kDa and an isoelectric point of 3.5 to 8.5, preferably 4.0 to 8.0 on gels used in the two-dimensional electrophoresis performed under the conditions described above in the subsection titled “Identification of antigens”.

[0788] Epitopes of the antigen in spot 9α reside in amino acids 236-245 (SEQ ID NO: 747), amino acids 283-290 (SEQ ID NO: 749) of SEQ ID NO: 201. The antigen in spot 9α may retain the sequence in SEQ ID NO: 201 as to amino acids at positions corresponding to the region of at least one of these epitopes.

[0789] From the viewpoint of improving sensitivity (a degree to which a patient can be diagnosed as being positive) or specificity (a degree to which a healthy subject is not diagnosed as being positive), the antigen in spot 9α may be the following variant.

[0790] In the epitope having the sequence of SEQ ID NO: 747, sites of amino acids other than X in SEQ ID NO: 745 or 746 are important for binding to IgE antibodies from allergic patients. Thus, in another preferred mode, amino acids 236-245 of SEQ ID NO: 201 in the antigen in spot 9α may have the amino acid sequence of SEQ ID NO: 745 or 746.

[0791] In the epitope having the sequence of SEQ ID NO: 749, sites of amino acids other than X in SEQ ID NO: 748 are important for binding to IgE antibodies from allergic patients. Thus, in another preferred mode, amino acids 283-290 of SEQ ID NO: 201 in the antigen in spot 9α may have the amino acid sequence of SEQ ID NO: 748.

[0792] Preferably, a protein that is an antigen in spot 9α has activity equivalent to that of the protein having the amino acid sequence of SEQ ID NO: 201 (lysine-tRNA ligase, cytoplasmic-like isoform X2) or causative of an allergy to soybean.

[0793] (10α) Antigen in Spot 10α

[0794] As the result of sequence identification of the antigen in spot 10α by mass spectroscopy, the amino acid sequences of SEQ ID NOs: 205-231 were detected.

[0795] Also, the mass spectroscopic data obtained for spot 10α on a mass spectrometer was analyzed by comparing the data against the NCBI protein data, and as a result, chaperonin CPN60-2, mitochondrial (amino acid sequence: SEQ ID NO: 204, encoding nucleotide sequence: SEQ ID NO: 203) was identified as a protein comprising any of SEQ ID NOs: 205 to 218 and chaperonin CPN60-2, mitochondrial-like isoform X1 (amino acid sequence: SEQ ID NO: 220, encoding nucleotide sequence: SEQ ID NO: 219) was identified as a protein comprising any of SEQ ID NOs: 221 to 231.

[0796] Accordingly, the antigen in spot 10α in the present invention can be any of proteins selected from the group consisting of the proteins as defined below in (10αA1-a) to (10αA1-e), (10αB1), (10αA2-a) to (10αA2-e), and (10αB2):
[0797] (10αA1-a) a protein comprising an amino acid sequence with deletion, substitution, insertion or addition of one or several amino acids in SEQ ID NO: 204;
[0798] (10αA1-b) a protein comprising an amino acid sequence having at least 70%, preferably at least 75%, at least 80%, at least 85%, at least 90%, at least 95%, at least 97%, at least 98%, or at least 99% identity to the amino acid sequence of SEQ ID NO: 204;
[0799] (10αA1-c) a protein comprising an amino acid sequence encoded by a nucleotide sequence with deletion, substitution, insertion or addition of one or several nucleotides in SEQ ID NO: 203;
[0800] (10αA1-d) a protein comprising an amino acid sequence encoded by a nucleotide sequence having at least 70%, preferably at least 75%, at least 80%, at least 85%, at least 90%, at least 95%, at least 97%, at least 98%, or at least 99% identity to the nucleotide sequence of SEQ ID NO: 203;
[0801] (10αA1-e) a protein comprising an amino acid sequence encoded by a nucleic acid that hybridizes under stringent conditions with a nucleic acid having a nucleotide sequence complementary to the nucleotide sequence of SEQ ID NO: 203;
[0802] (10αB1) a protein comprising at least one amino acid sequence selected from the group consisting of SEQ ID NOs: 205-218, preferably a protein comprising at least 2, 3, 4, 5, 6, 7, 8, 9, 10, 11, 12, or 13 or all sequences of the amino acid sequences. As referred to above, the amino acid sequence of any of SEQ ID NOs: 205 to 218 may be an amino acid sequence derived therefrom by deletion, substitution, insertion or addition of one or several amino acids;
[0803] (10αA2-a) a protein comprising an amino acid sequence with deletion, substitution, insertion or addition of one or several amino acids in SEQ ID NO: 220;
[0804] (10αA2-b) a protein comprising an amino acid sequence having at least 70%, preferably at least 75%, at least 80%, at least 85%, at least 90%, at least 95%, at least 97%, at least 98%, or at least 99% identity to the amino acid sequence of SEQ ID NO: 220;
[0805] (10αA2-c) a protein comprising an amino acid sequence encoded by a nucleotide sequence with deletion, substitution, insertion or addition of one or several nucleotides in SEQ ID NO: 219;
[0806] (10αA2-d) a protein comprising an amino acid sequence encoded by a nucleotide sequence having at least 70%, preferably at least 75%, at least 80%, at least 85%, at least 90%, at least 95%, at least 97%, at least 98%, or at least 99% identity to the nucleotide sequence of SEQ ID NO: 219;
[0807] (10αA2-e) a protein comprising an amino acid sequence encoded by a nucleic acid that hybridizes under stringent conditions with a nucleic acid having a nucleotide sequence complementary to the nucleotide sequence of SEQ ID NO: 219;
[0808] (10αB2) a protein comprising at least one amino acid sequence selected from the group consisting of SEQ ID NOs: 221-231, preferably a protein comprising at least 2, 3, 4, 5, 6, 7, 8, 9, or 10, or all sequences of the amino acid sequences. As referred to above, the amino acid sequence of any of SEQ ID NOs: 221 to 231 may be an amino acid sequence derived therefrom by deletion, substitution, insertion or addition of one or several amino acids.

[0809] The protein selected from the group consisting of the proteins as defined above in (10αA1-a) to (10αA1-e), (10αB1), (10αA2-a) to (10αA2-e), and (10αB2) can be proteins that are found in a protein spot with a molecular weight of around 30 to 90 kDa, preferably around 40 to 80 kDa, and an isoelectric point of 3.5 to 7.5, preferably 4.0 to 7.0 on gels used in the two-dimensional electrophoresis performed under the conditions described above in the subsection titled “Identification of antigens”.

[0810] Preferably, a protein that is an antigen in spot 10α has activity equivalent to that of the protein having the amino acid sequence of SEQ ID NO: 204 (haperonin CPN60-2, mitochondrial) or the protein having the amino acid sequence of SEQ ID NO: 220 (chaperonin CPN60-2, mitochondrial-like isoform X1) or causative of an allergy to soybean.

[0811] (11α) Antigen in Spot 11α

[0812] As the result of sequence identification of the antigen in spot 11α by mass spectroscopy, the amino acid sequences of SEQ ID NOs: 234-237 were detected.

[0813] Also, the mass spectroscopic data obtained for spot 11α on a mass spectrometer was analyzed by comparing the data against the NCBI protein data, and as a result, polyadenylate-binding protein 8 isoform X3 (amino acid sequence: SEQ ID NO: 233, encoding nucleotide sequence: SEQ ID NO: 232) was identified as a protein comprising any of SEQ ID NOs: 234 to 237.

[0814] Accordingly, the antigens in spot 11α in the present invention can be any protein selected from the group consisting of the proteins as defined below in (11αA-a) to (11αA-e) and (11αB):
[0815] (11αA-a) a protein comprising an amino acid sequence with deletion, substitution, insertion or addition of one or several amino acids in SEQ ID NO: 233;
[0816] (11αA-b) a protein comprising an amino acid sequence having at least 70%, preferably at least 75%, at least 80%, at least 85%, at least 90%, at least 95%, at least 97%, at least 98%, or at least 99% identity to the amino acid sequence of SEQ ID NO: 233;
[0817] (11αA-c) a protein comprising an amino acid sequence encoded by a nucleotide sequence with deletion, substitution, insertion or addition of one or several nucleotides in SEQ ID NO: 232;
[0818] (11αA-d) a protein comprising an amino acid sequence encoded by a nucleotide sequence having at least 70%, preferably at least 75%, at least 80%, at least 85%, at least 90%, at least 95%, at least 97%, at least 98%, or at least 99% identity to the nucleotide sequence of SEQ ID NO: 232;
[0819] (11αA-e) a protein comprising an amino acid sequence encoded by a nucleic acid that hybridizes under stringent conditions with a nucleic acid having a nucleotide sequence complementary to the nucleotide sequence of SEQ ID NO: 232;
[0820] (11αB) a protein comprising at least one amino acid sequence selected from the group consisting of SEQ ID NOs: 234-237, preferably a protein comprising at least 2 or 3 or all sequences of the amino acid sequences. As referred to above, the amino acid sequence of any of SEQ ID NOs: 234-237 may be an amino acid sequence derived therefrom by deletion, substitution, insertion or addition of one or several amino acids.

[0821] The proteins selected from the group consisting of (11αA-a) to (11αA-e) and (11αB) as defined above can be proteins that are found in a protein spot with a molecular weight of around 30 to 90 kDa, preferably around 40 to 80 kDa and an isoelectric point of 3.5 to 8.5, preferably 4.0 to 8.0 on gels used in the two-dimensional electrophoresis performed under the conditions described above in the subsection titled “Identification of antigens”.

[0822] Epitopes of the antigen in spot 11α reside in amino acids 454-463 (SEQ ID NO: 753), amino acids 363-370 (SEQ ID NO: 754) of SEQ ID NO: 233. The antigen in spot 11α may retain the sequence in SEQ ID NO: 233 as to amino acids at positions corresponding to the region of at least one of these epitopes.

[0823] From the viewpoint of improving sensitivity (a degree to which a patient can be diagnosed as being positive) or specificity (a degree to which a healthy subject is not diagnosed as being positive), the antigen in spot 11α may be the following variant.

[0824] In the epitope having the sequence of SEQ ID NO: 753, sites of amino acids other than X in SEQ ID NO: 751 or 752 are important for binding to IgE antibodies from allergic patients. Thus, in another preferred mode, amino acids 454-463 of SEQ ID NO: 223 in the antigen in spot 11 α may have the amino acid sequence of SEQ ID NO: 751 or 752.

[0825] Preferably, a protein that is an antigen in spot 11α has activity equivalent to that of the protein having the amino acid sequence of SEQ ID NO: 233 (polyadenylate-binding protein 8 isoform X3) or causative of an allergy to soybean.

[0826] (12α) Antigen in Spot 12α

[0827] As the result of sequence identification of the antigen in spot 12α by mass spectroscopy, the amino acid sequence of SEQ ID NO: 240 was detected.

[0828] Also, the mass spectroscopic data obtained for spot 12α on a mass spectrometer was analyzed by comparing the data against the NCBI protein data, and as a result, pyrophosphate-fructose 6-phosphate 1-phosphotransferase subunit alpha-like (amino acid sequence: SEQ ID NO: 239, encoding nucleotide sequence: SEQ ID NO: 238) was identified as a protein comprising SEQ ID NO: 240.

[0829] Accordingly, the antigens in spot 12α in the present invention can be any protein selected from the group consisting of the proteins as defined below in (12αA-a) to (12αA-e) and (12αB):
[0830] (12αA-a) a protein comprising an amino acid sequence with deletion, substitution, insertion or addition of one or several amino acids in SEQ ID NO: 239;
[0831] (12αA-b) a protein comprising an amino acid sequence having at least 70%, preferably at least 75%, at least 80%, at least 85%, at least 90%, at least 95%, at least 97%, at least 98%, or at least 99% identity to the amino acid sequence of SEQ ID NO: 239;
[0832] (12αA-c) a protein comprising an amino acid sequence encoded by a nucleotide sequence with deletion, substitution, insertion or addition of one or several nucleotides in SEQ ID NO: 238;
[0833] (12αA-d) a protein comprising an amino acid sequence encoded by a nucleotide sequence having at least 70%, preferably at least 75%, at least 80%, at least 85%, at least 90%, at least 95%, at least 97%, at least 98%, or at least 99% identity to the nucleotide sequence of SEQ ID NO: 238;
[0834] (12αA-e) a protein comprising an amino acid sequence encoded by a nucleic acid that hybridizes under stringent conditions with a nucleic acid having a nucleotide sequence complementary to the nucleotide sequence of SEQ ID NO: 238;
[0835] (12αB) a protein comprising an amino acid sequence of SEQ ID NO: 240. As referred to above, the amino acid sequence(s) of SEQ ID NO: 240 may be an amino acid sequence(s) derived therefrom by deletion, substitution, insertion or addition of one or several amino acids.

[0836] The proteins selected from the group consisting of (12αA-a) to (12αA-e) and (12αB) as defined above can be proteins that are found in a protein spot with a molecular weight of around 30 to 90 kDa, preferably around 40 to 80 kDa and an isoelectric point of 3.5 to 8.5, preferably 4.0 to 8.0 on gels used in the two-dimensional electrophoresis performed under the conditions described above in the subsection titled “Identification of antigens”.

[0837] An epitope of the antigen in spot 12α resides in amino acids 551-565 (SEQ ID NO: 755) of SEQ ID NO: 239. The antigen in spot 1 la may retain the sequence in SEQ ID NO: 239 as to amino acids at positions corresponding to the region of this epitope.

[0838] Preferably, a protein that is an antigen in spot 12α has activity equivalent to that of the protein having the amino acid sequence of SEQ ID NO: 239 (pyrophosphate-fructose 6-phosphate 1-phosphotransferase subunit alpha-like) or causative of an allergy to soybean.

[0839] (13α) Antigen in Spot 13α

[0840] As the result of sequence identification of the antigen in spot 13α by mass spectroscopy, the amino acid sequences of SEQ ID NOs: 243-278 were detected.

[0841] Also, the mass spectroscopic data obtained for spot 13α on a mass spectrometer was analyzed by comparing the data against the NCBI protein data, and as a result, protein disulfide isomerase-like protein precursor (amino acid sequence: SEQ ID NO: 242, encoding nucleotide sequence: SEQ ID NO: 241) was identified as a protein comprising any of SEQ ID NOs: 243 to 252 and protein disulfide-isomerase (amino acid sequence: SEQ ID NO: 254, encoding nucleotide sequence: SEQ ID NO: 253) was identified as a protein comprising any of SEQ ID NOs: 255 to 278.

[0842] Accordingly, the antigen in spot 13α in the present invention can be any of proteins selected from the group consisting of the proteins as defined below in (13αA1-a) to (13αA1-e), (13αB1), (13αA2-a) to (13αA2-e), and (13αB2): (13αA1-a) a protein comprising an amino acid sequence with deletion, substitution, insertion or addition of one or several amino acids in SEQ ID NO: 242;
[0843] (13αA1-b) a protein comprising an amino acid sequence having at least 70%, preferably at least 75%, at least 80%, at least 85%, at least 90%, at least 95%, at least 97%, at least 98%, or at least 99% identity to the amino acid sequence of SEQ ID NO: 242;
[0844] (13αA1-c) a protein comprising an amino acid sequence encoded by a nucleotide sequence with deletion, substitution, insertion or addition of one or several nucleotides in SEQ ID NO: 241;
[0845] (13αA1-d) a protein comprising an amino acid sequence encoded by a nucleotide sequence having at least 70%, preferably at least 75%, at least 80%, at least 85%, at least 90%, at least 95%, at least 97%, at least 98%, or at least 99% identity to the nucleotide sequence of SEQ ID NO: 241;
[0846] (13αA1-e) a protein comprising an amino acid sequence encoded by a nucleic acid that hybridizes under stringent conditions with a nucleic acid having a nucleotide sequence complementary to the nucleotide sequence of SEQ ID NO: 241;
[0847] (13αB1) a protein comprising at least one amino acid sequence selected from the group consisting of SEQ ID NOs: 243-252, preferably a protein comprising at least 2, 3, 4, 5, 6, 7, 8, or 9, or all sequences of the amino acid sequences. As referred to above, the amino acid sequence of any of SEQ ID NOs: 205 to 218 may be an amino acid sequence derived therefrom by deletion, substitution, insertion or addition of one or several amino acids;
[0848] (13αA2-a) a protein comprising an amino acid sequence with deletion, substitution, insertion or addition of one or several amino acids in SEQ ID NO: 254;
[0849] (13αA2-b) a protein comprising an amino acid sequence having at least 70%, preferably at least 75%, at least 80%, at least 85%, at least 90%, at least 95%, at least 97%, at least 98%, or at least 99% identity to the amino acid sequence of SEQ ID NO: 254;
[0850] (13αA2-c) a protein comprising an amino acid sequence encoded by a nucleotide sequence with deletion, substitution, insertion or addition of one or several nucleotides in SEQ ID NO: 253;
[0851] (13αA2-d) a protein comprising an amino acid sequence encoded by a nucleotide sequence having at least 70%, preferably at least 75%, at least 80%, at least 85%, at least 90%, at least 95%, at least 97%, at least 98%, or at least 99% identity to the nucleotide sequence of SEQ ID NO: 253;
[0852] (13αA2-e) a protein comprising an amino acid sequence encoded by a nucleic acid that hybridizes under stringent conditions with a nucleic acid having a nucleotide sequence complementary to the nucleotide sequence of SEQ ID NO: 253;
[0853] (13αB2) a protein comprising at least one amino acid sequence selected from the group consisting of SEQ ID NOs: 255-278, preferably a protein comprising at least 2, 3, 4, 5, 6, 7, 8, 9, 10, 11, 12, 13, 14, 15, 16, 17, 18, 19, 20, 21, 22, or 23, or all sequences of the amino acid sequences. As referred to above, the amino acid sequence of any of SEQ ID NOs: 221 to 231 may be an amino acid sequence derived therefrom by deletion, substitution, insertion or addition of one or several amino acids.

[0854] The protein selected from the group consisting of the proteins as defined above in (13αA1-a) to (13αA1-e), (13αB1), (13αA2-a) to (13αA2-e), and (13αB2) can be proteins that are found in a protein spot with a molecular weight of around 30 to 90 kDa, preferably around 40 to 80 kDa, and an isoelectric point of 3.5 to 7.5, preferably 4.0 to 7.0 on gels used in the two-dimensional electrophoresis performed under the conditions described above in the subsection titled “Identification of antigens”.

[0855] Epitopes of the aforementioned antigens (13αA1-a) to (13αA1-e) and (13αB1) reside in amino acids 471-485 (SEQ ID NO: 758) of SEQ ID NO: 242. When the antigen in spot 13α contains a variation in the amino acid sequence of SEQ ID NO: 242, this antigen may retain the sequence in SEQ ID NO: 242 as to amino acids at positions corresponding to the region of at least one of these epitopes.

[0856] From the viewpoint of improving sensitivity (a degree to which a patient can be diagnosed as being positive) or specificity (a degree to which a healthy subject is not diagnosed as being positive), the antigen in spot 13α may be the following variant.

[0857] In the epitope having the sequence of SEQ ID NO: 758, sites of amino acids other than X in SEQ ID NO: 756 or 757 are important for binding to IgE antibodies from allergic patients. Thus, in another preferred mode, when the antigen in spot 13α contains a variation in the amino acid sequence of SEQ ID NO: 242, amino acids 471-485 of SEQ ID NO: 242 in this antigen may have the amino acid sequence of SEQ ID NO: 756 or 757.

[0858] Preferably, a protein that is an antigen in spot 13α has activity equivalent to that of the protein having the amino acid sequence of SEQ ID NO: 242 (protein disulfide isomerase-like protein precursor) or the protein having the amino acid sequence of SEQ ID NO: 254 (protein disulfide-isomerase) or causative of an allergy to soybean.

[0859] (14α) Antigen in Spot 14α

[0860] As the result of sequence identification of the antigen in spot 14α by mass spectroscopy, the amino acid sequences of SEQ ID NOs: 281-289 were detected.

[0861] Also, the mass spectroscopic data obtained for spot 14α on a mass spectrometer was analyzed by comparing the data against the NCBI protein data, and as a result, V-type proton ATPase subunit B2 (amino acid sequence: SEQ ID NO: 280, encoding nucleotide sequence: SEQ ID NO: 279) was identified as a protein comprising any of SEQ ID NOs: 281 to 284 and V-type proton ATPase subunit B2 (amino acid sequence: SEQ ID NO: 286, encoding nucleotide sequence: SEQ ID NO: 285) was identified as a protein comprising any of SEQ ID NOs: 287 to 289.

[0862] Accordingly, the antigen in spot 14α in the present invention can be any of proteins selected from the group consisting of the proteins as defined below in (14αA1-a) to (14αA1-e), (14αB1), (14αA2-a) to (14αA2-e), and (14αB2): (14αA1-a) a protein comprising an amino acid sequence with deletion, substitution, insertion or addition of one or several amino acids in SEQ ID NO: 280;
[0863] (14αA1-b) a protein comprising an amino acid sequence having at least 70%, preferably at least 75%, at least 80%, at least 85%, at least 90%, at least 95%, at least 97%, at least 98%, or at least 99% identity to the amino acid sequence of SEQ ID NO: 280;
[0864] (14αA1-c) a protein comprising an amino acid sequence encoded by a nucleotide sequence with deletion, substitution, insertion or addition of one or several nucleotides in SEQ ID NO: 279;
[0865] (14αA1-d) a protein comprising an amino acid sequence encoded by a nucleotide sequence having at least 70%, preferably at least 75%, at least 80%, at least 85%, at least 90%, at least 95%, at least 97%, at least 98%, or at least 99% identity to the nucleotide sequence of SEQ ID NO: 279;
[0866] (14αA1-e) a protein comprising an amino acid sequence encoded by a nucleic acid that hybridizes under stringent conditions with a nucleic acid having a nucleotide sequence complementary to the nucleotide sequence of SEQ ID NO: 279;
[0867] (14αB1) a protein comprising at least one amino acid sequence selected from the group consisting of SEQ ID NOs: 281-284, preferably a protein comprising at least 2, 3, or all sequences of the amino acid sequences. As referred to above, the amino acid sequence of any of SEQ ID NOs: 281 to 284 may be an amino acid sequence derived therefrom by deletion, substitution, insertion or addition of one or several amino acids;
[0868] (14αA2-a) a protein comprising an amino acid sequence with deletion, substitution, insertion or addition of one or several amino acids in SEQ ID NO: 286;
[0869] (14αA2-b) a protein comprising an amino acid sequence having at least 70%, preferably at least 75%, at least 80%, at least 85%, at least 90%, at least 95%, at least 97%, at least 98%, or at least 99% identity to the amino acid sequence of SEQ ID NO: 286;
[0870] (14αA2-c) a protein comprising an amino acid sequence encoded by a nucleotide sequence with deletion, substitution, insertion or addition of one or several nucleotides in SEQ ID NO: 285;
[0871] (14αA2-d) a protein comprising an amino acid sequence encoded by a nucleotide sequence having at least 70%, preferably at least 75%, at least 80%, at least 85%, at least 90%, at least 95%, at least 97%, at least 98%, or at least 99% identity to the nucleotide sequence of SEQ ID NO: 285;
[0872] (14αA2-e) a protein comprising an amino acid sequence encoded by a nucleic acid that hybridizes under stringent conditions with a nucleic acid having a nucleotide sequence complementary to the nucleotide sequence of SEQ ID NO: 285;
[0873] (14αB2) a protein comprising at least one amino acid sequence selected from the group consisting of SEQ ID NOs: 287-289, preferably a protein comprising at least 2, or all sequences of the amino acid sequences. As referred to above, the amino acid sequence of any of SEQ ID NOs: 287 to 289 may be an amino acid sequence derived therefrom by deletion, substitution, insertion or addition of one or several amino acids.

[0874] The protein selected from the group consisting of the proteins as defined above in (14αA1-a) to (14αA1-e), (14αB1), (14αA2-a) to (14αA2-e), and (14αB2) can be proteins that are found in a protein spot with a molecular weight of around 30 to 90 kDa, preferably around 40 to 80 kDa, and an isoelectric point of 2.5 to 6.5, preferably 3.0 to 6.0 on gels used in the two-dimensional electrophoresis performed under the conditions described above in the subsection titled “Identification of antigens”.

[0875] Epitopes of the aforementioned antigens (14αA1-a) to (14αA1-e) and (14αB1) reside in amino acids 191-205 (SEQ ID NO: 761) and amino acids 391-405 (SEQ ID NO: 764) of SEQ ID NO: 280. When the antigen in spot 14α contains a variation in the amino acid sequence of SEQ ID NO: 280, this antigen may retain the sequence in SEQ ID NO: 280 as to amino acids at positions corresponding to the region of at least one of these epitopes.

[0876] From the viewpoint of improving sensitivity (a degree to which a patient can be diagnosed as being positive) or specificity (a degree to which a healthy subject is not diagnosed as being positive), the antigen in spot 14α may be the following variant.

[0877] In the epitope having the sequence of SEQ ID NO: 761, sites of amino acids other than X in SEQ ID NO: 759 or 760 are important for binding to IgE antibodies from allergic patients. Thus, in another preferred mode, when the antigen in spot 14ot contains a variation in the amino acid sequence of SEQ ID NO: 280, amino acids 191-205 of SEQ ID NO: 280 in this antigen may each independently have the amino acid sequence of SEQ ID NO: 759 or 760.

[0878] In the epitope having the sequence of SEQ ID NO: 764, sites of amino acids other than X in SEQ ID NO: 762 or 763 are important for binding to IgE antibodies from allergic patients. Thus, in another preferred mode, when the antigen in spot 14α contains a variation in the amino acid sequence of SEQ ID NO: 280, amino acids 391-405 of SEQ ID NO: 280 in this antigen may each independently have the amino acid sequence of SEQ ID NO: 762 or 763.

[0879] Preferably, a protein that is an antigen in spot 14α has activity equivalent to that of the protein having the amino acid sequence of SEQ ID NO: 280 or 286 (V-type proton ATPase subunit B2) or causative of an allergy to soybean.

[0880] (15α, 16α) Antigens in Spots 15α, 16α

[0881] As the result of sequence identification of the antigens in spots 15ot and 16α by mass spectroscopy, the amino acid sequences of SEQ ID NOs: 292-318 were detected.

[0882] Also, the mass spectroscopic data obtained for spots 15α, 16α on a mass spectrometer was analyzed by comparing the data against the NCBI protein data, and as a result, UTP-glucose- 1-phosphate uridylyltransferase (amino acid sequence: SEQ ID NO: 291, encoding nucleotide sequence: SEQ ID NO: 290) was identified as a protein comprising any of SEQ ID NOs: 292 to 304 and the hypothetical protein GLYMA 02G241100 (amino acid sequence: SEQ ID NO: 306, encoding nucleotide sequence: SEQ ID NO: 305) was identified as a protein comprising any of SEQ ID NOs: 307 to 318.

[0883] Accordingly, the antigen in spot 15α, 16α in the present invention can be any of proteins selected from the group consisting of the proteins as defined below in (15, 16αA 1-a) to (15, 16αA1-e), (15, 16α,B1), (15, 16αA2-a) to (15, 16αA2-e), and (15, 16αB2): (15, 16αA1-a) a protein comprising an amino acid sequence with deletion, substitution, insertion or addition of one or several amino acids in SEQ ID NO: 291;
[0884] (15, 16αA1-b) a protein comprising an amino acid sequence having at least 70%, preferably at least 75%, at least 80%, at least 85%, at least 90%, at least 95%, at least 97%, at least 98%, or at least 99% identity to the amino acid sequence of SEQ ID NO: 291;
[0885] (15, 16αA1-c) a protein comprising an amino acid sequence encoded by a nucleotide sequence with deletion, substitution, insertion or addition of one or several nucleotides in SEQ ID NO: 290;
[0886] (15, 16αA1-d) a protein comprising an amino acid sequence encoded by a nucleotide sequence having at least 70%, preferably at least 75%, at least 80%, at least 85%, at least 90%, at least 95%, at least 97%, at least 98%, or at least 99% identity to the nucleotide sequence of SEQ ID NO: 290;
[0887] (15, 16αA1-e) a protein comprising an amino acid sequence encoded by a nucleic acid that hybridizes under stringent conditions with a nucleic acid having a nucleotide sequence complementary to the nucleotide sequence of SEQ ID NO: 290;
[0888] (15, 16αB1) a protein comprising at least one amino acid sequence selected from the group consisting of SEQ ID NOs: 292-304, preferably a protein comprising at least 2, 3, 4, 5, 6, 7, 8, 9, 10, 11, or 12 or all sequences of the amino acid sequences. As referred to above, the amino acid sequence of any of SEQ ID NOs: 292 to 304 may be an amino acid sequence derived therefrom by deletion, substitution, insertion or addition of one or several amino acids;
[0889] (15, 16αA2-a) a protein comprising an amino acid sequence with deletion, substitution, insertion or addition of one or several amino acids in SEQ ID NO: 306;
[0890] (15, 16αA2-b) a protein comprising an amino acid sequence having at least 70%, preferably at least 75%, at least 80%, at least 85%, at least 90%, at least 95%, at least 97%, at least 98%, or at least 99% identity to the amino acid sequence of SEQ ID NO: 306;
[0891] (15, 16αA2-c) a protein comprising an amino acid sequence encoded by a nucleotide sequence with deletion, substitution, insertion or addition of one or several nucleotides in SEQ ID NO: 305;
[0892] (15, 16αA2-d) a protein comprising an amino acid sequence encoded by a nucleotide sequence having at least 70%, preferably at least 75%, at least 80%, at least 85%, at least 90%, at least 95%, at least 97%, at least 98%, or at least 99% identity to the nucleotide sequence of SEQ ID NO: 305;
[0893] (15, 16αA2-e) a protein comprising an amino acid sequence encoded by a nucleic acid that hybridizes under stringent conditions with a nucleic acid having a nucleotide sequence complementary to the nucleotide sequence of SEQ ID NO: 305;
[0894] (15, 16αB2) a protein comprising at least one amino acid sequence selected from the group consisting of SEQ ID NOs: 307-318, preferably a protein comprising at least 2, 3, 4, 5, 6, 7, 8, 9, 10, or 11 or all sequences of the amino acid sequences. As referred to above, the amino acid sequence of any of SEQ ID NOs: 307 to 318 may be an amino acid sequence derived therefrom by deletion, substitution, insertion or addition of one or several amino acids.

[0895] The protein selected from the group consisting of the proteins as defined above in (15, 16αA1-a) to (15, 16αA1-e), (15, 16αB1), (15, 16αA2-a) to (15, 16αA2-e), and (15, 16αB2) can be proteins that are found in a protein spot with a molecular weight of around 20 to 90 kDa, preferably around 30 to 80 kDa, and an isoelectric point of 3.5 to 7.5, preferably 4.0 to 7.0 on gels used in the two-dimensional electrophoresis performed under the conditions described above in the subsection titled “Identification of antigens”.

[0896] Epitopes of the aforementioned antigens (15, 16αA1-a) to (15, 16αA1-e) and (15, 16αB1) reside in amino acids 211-225 (SEQ ID NO: 766) of SEQ ID NO: 291. When the antigen in spot 15α, 16α contains a variation in the amino acid sequence of SEQ ID NO: 291, this antigen may retain the sequence in SEQ ID NO: 291 as to amino acids at positions corresponding to the region of at least one of these epitopes.

[0897] From the viewpoint of improving sensitivity (a degree to which a patient can be diagnosed as being positive) or specificity (a degree to which a healthy subject is not diagnosed as being positive), the antigen in spot 15α, 16α may be the following variant.

[0898] In the epitope having the sequence of SEQ ID NO: 766, sites of amino acids other than X in SEQ ID NO: 765 are important for binding to IgE antibodies from allergic patients. Thus, in another preferred mode, when the antigen in spot 15α, 16α contains a variation in the amino acid sequence of SEQ ID NO: 291, amino acids 211-225 of SEQ ID NO: 291 in this antigen may have the amino acid sequence of SEQ ID NO: 765.

[0899] Preferably, a protein that is an antigen in spot 15α or 16α has activity equivalent to that of the protein having the amino acid sequence of SEQ ID NO: 291 (UTP-glucose- 1-phosphate uridylyltransferase) or the protein having the amino acid sequence of SEQ ID NO: 306 (hypothetical protein GLYMA_02G241100) or causative of an allergy to soybean.

[0900] (17α) Antigen in Spot 17α

[0901] As the result of sequence identification of the antigen in spot 17α by mass spectroscopy, the amino acid sequences of SEQ ID NOs: 321-332 were detected.

[0902] Also, the mass spectroscopic data obtained for spot 17α on a mass spectrometer was analyzed by comparing the data against the NCBI protein data, and as a result, guanosine nucleotide diphosphate dissociation inhibitor 2 (amino acid sequence: SEQ ID NO: 320, encoding nucleotide sequence: SEQ ID NO: 319) was identified as a protein comprising any of SEQ ID NOs: 321 to 325 and rab GDP dissociation inhibitor alpha-like (amino acid sequence: SEQ ID NO: 327, encoding nucleotide sequence: SEQ ID NO: 326) was identified as a protein comprising any of SEQ ID NOs: 328 to 332.

[0903] Accordingly, the antigen in spot 17α in the present invention can be any of proteins selected from the group consisting of the proteins as defined below in (17αA1-a) to (17αA1-e), (17αB1), (17αA2-a) to (17αA2-e), and (17αB2):
[0904] (17αA1-a) a protein comprising an amino acid sequence with deletion, substitution, insertion or addition of one or several amino acids in SEQ ID NO: 320;
[0905] (17αA1-b) a protein comprising an amino acid sequence having at least 70%, preferably at least 75%, at least 80%, at least 85%, at least 90%, at least 95%, at least 97%, at least 98%, or at least 99% identity to the amino acid sequence of SEQ ID NO: 320;
[0906] (17αA1-c) a protein comprising an amino acid sequence encoded by a nucleotide sequence with deletion, substitution, insertion or addition of one or several nucleotides in SEQ ID NO: 319;
[0907] (17αA1-d) a protein comprising an amino acid sequence encoded by a nucleotide sequence having at least 70%, preferably at least 75%, at least 80%, at least 85%, at least 90%, at least 95%, at least 97%, at least 98%, or at least 99% identity to the nucleotide sequence of SEQ ID NO: 319;
[0908] (17αA1-e) a protein comprising an amino acid sequence encoded by a nucleic acid that hybridizes under stringent conditions with a nucleic acid having a nucleotide sequence complementary to the nucleotide sequence of SEQ ID NO: 319;
[0909] (17αB1) a protein comprising at least one amino acid sequence selected from the group consisting of SEQ ID NOs: 321-325, preferably a protein comprising at least 2, 3, or 4 or all sequences of the amino acid sequences. As referred to above, the amino acid sequence of any of SEQ ID NOs: 321 to 325 may be an amino acid sequence derived therefrom by deletion, substitution, insertion or addition of one or several amino acids.
[0910] (17αA2-a) a protein comprising an amino acid sequence with deletion, substitution, insertion or addition of one or several amino acids in SEQ ID NO: 327;
[0911] (17αA2-b) a protein comprising an amino acid sequence having at least 70%, preferably at least 75%, at least 80%, at least 85%, at least 90%, at least 95%, at least 97%, at least 98%, or at least 99% identity to the amino acid sequence of SEQ ID NO: 327;
[0912] (17αA2-c) a protein comprising an amino acid sequence encoded by a nucleotide sequence with deletion, substitution, insertion or addition of one or several nucleotides in SEQ ID NO: 326;
[0913] (17αA2-d) a protein comprising an amino acid sequence encoded by a nucleotide sequence having at least 70%, preferably at least 75%, at least 80%, at least 85%, at least 90%, at least 95%, at least 97%, at least 98%, or at least 99% identity to the nucleotide sequence of SEQ ID NO: 326;
[0914] (17αA2-e) a protein comprising an amino acid sequence encoded by a nucleic acid that hybridizes under stringent conditions with a nucleic acid having a nucleotide sequence complementary to the nucleotide sequence of SEQ ID NO: 326;
[0915] (17αB2) a protein comprising at least one amino acid sequence selected from the group consisting of SEQ ID NOs: 328-332, preferably a protein comprising at least 2, 3, or 4 or all sequences of the amino acid sequences. As referred to above, the amino acid sequence of any of SEQ ID NOs: 328 to 332 may be an amino acid sequence derived therefrom by deletion, substitution, insertion or addition of one or several amino acids;

[0916] The protein selected from the group consisting of the proteins as defined above in (17αA1-a) to (17αA1-e), (17αB1), (17αA2-a) to (17αA2-e), and (17αB2) can be proteins that are found in a protein spot with a molecular weight of around 20 to 90 kDa, preferably around 30 to 80 kDa, and an isoelectric point of 3.5 to 7.5, preferably 4.0 to 7.0 on gels used in the two-dimensional electrophoresis performed under the conditions described above in the subsection titled “Identification of antigens”.

[0917] Epitopes of the aforementioned antigens (17αA1-a) to (17αA1-e) and (17αB1) reside in amino acids 171-185 (SEQ ID NO: 767) of SEQ ID NO: 320. When the antigen in spot 17α contains a variation in the amino acid sequence of SEQ ID NO: 320, this antigen may retain the sequence in SEQ ID NO: 320 as to amino acids at positions corresponding to the region of at least one of these epitopes.

[0918] Preferably, a protein that is an antigen in spot 17α has activity equivalent to that of the protein having the amino acid sequence of SEQ ID NO: 320 (guanosine nucleotide diphosphate dissociation inhibitor 2) or the protein having the amino acid sequence of SEQ ID NO: 327 (rab GDP dissociation inhibitor alpha-like) or causative of an allergy to soybean.

[0919] (18α) Antigen in Spot 18α

[0920] As the result of sequence identification of the antigen in spot 18α by mass spectroscopy, the amino acid sequences of SEQ ID NOs: 335-339 were detected.

[0921] Also, the mass spectroscopic data obtained for spot 18α on a mass spectrometer was analyzed by comparing the data against the NCBI protein data, and as a result, hypothetical protein GLYMA_10G028300 (amino acid sequence: SEQ ID NO: 334, encoding nucleotide sequence: SEQ ID NO: 333) was identified as a protein comprising any of SEQ ID NOs: 335 to 339.

[0922] Accordingly, the antigens in spot 18α in the present invention can be any protein selected from the group consisting of the proteins as defined below in (18αA-a) to (18αA-e) and (18αB):
[0923] (18αA-a) a protein comprising an amino acid sequence with deletion, substitution, insertion or addition of one or several amino acids in SEQ ID NO: 334;
[0924] (18αA-b) a protein comprising an amino acid sequence having at least 70%, preferably at least 75%, at least 80%, at least 85%, at least 90%, at least 95%, at least 97%, at least 98%, or at least 99% identity to the amino acid sequence of SEQ ID NO: 334;
[0925] (18αA-c) a protein comprising an amino acid sequence encoded by a nucleotide sequence with deletion, substitution, insertion or addition of one or several nucleotides in SEQ ID NO: 333;
[0926] (18αA-d) a protein comprising an amino acid sequence encoded by a nucleotide sequence having at least 70%, preferably at least 75%, at least 80%, at least 85%, at least 90%, at least 95%, at least 97%, at least 98%, or at least 99% identity to the nucleotide sequence of SEQ ID NO: 333;
[0927] (18αA-e) a protein comprising an amino acid sequence encoded by a nucleic acid that hybridizes under stringent conditions with a nucleic acid having a nucleotide sequence complementary to the nucleotide sequence of SEQ ID NO: 333;
[0928] (18αB) a protein comprising at least one amino acid sequence selected from the group consisting of SEQ ID NOs: 335-339, preferably a protein comprising at least 2, 3 or 4 or all sequences of the amino acid sequences. As referred to above, the amino acid sequence of any of SEQ ID NOs: 335-339 may be an amino acid sequence derived therefrom by deletion, substitution, insertion or addition of one or several amino acids.

[0929] The proteins selected from the group consisting of (18αA-a) to (18αA-e) and (18αB) as defined above can be proteins that are found in a protein spot with a molecular weight of around 30 to 90 kDa, preferably around 40 to 80 kDa and an isoelectric point of 3.5 to 8.5, preferably 4.0 to 8.0 on gels used in the two-dimensional electrophoresis performed under the conditions described above in the subsection titled “Identification of antigens”.

[0930] Epitopes of the antigen in spot 18α reside in amino acids 52-60 (SEQ ID NO: 750), amino acids 81-95 (SEQ ID NO: 768), amino acids 101-115 (SEQ ID NO: 771), amino acids 281-295 (SEQ ID NO: 772), amino acids 491-500 (SEQ ID NO: 775) of SEQ ID NO: 334. The antigen in spot 18cx may retain the sequence in SEQ ID NO: 334 as to amino acids at positions corresponding to the region of at least one of these epitopes.

[0931] From the viewpoint of improving sensitivity (a degree to which a patient can be diagnosed as being positive) or specificity (a degree to which a healthy subject is not diagnosed as being positive), the antigen in spot 18α may be the following variant.

[0932] In the epitope having the sequence of SEQ ID NO: 771, sites of amino acids other than X in SEQ ID NO: 769 or 770 are important for binding to IgE antibodies from allergic patients. Thus, in another preferred mode, amino acids 101-115 of SEQ ID NO: 334 in the antigen in spot 18α may have the amino acid sequence of SEQ ID NO: 769 or 770.

[0933] In the epitope having the sequence of SEQ ID NO: 775, sites of amino acids other than X in SEQ ID NO: 773 or 774 are important for binding to IgE antibodies from allergic patients. Thus, in another preferred mode, amino acids 491-500 of SEQ ID NO: 334 in the antigen in spot 18α may have the amino acid sequence of SEQ ID NO: 773 or 774.

[0934] Preferably, a protein that is an antigen in spot 18α has activity equivalent to that of the protein having the amino acid sequence of SEQ ID NO: 334 (hypothetical protein GLYMA_10G028300) or causative of an allergy to soybean.

[0935] (19α) Antigen in Spot 19α

[0936] As the result of sequence identification of the antigen in spot 19α by mass spectroscopy, the amino acid sequences of SEQ ID NOs: 342-346 were detected.

[0937] Also, the mass spectroscopic data obtained for spot 19α on a mass spectrometer was analyzed by comparing the data against the NCBI protein data, and as a result, sucrose binding protein homolog S-64 (amino acid sequence: SEQ ID NO: 341, encoding nucleotide sequence: SEQ ID NO: 340) was identified as a protein comprising any of SEQ ID NOs: 342 to 346.

[0938] Accordingly, the antigens in spot 19α in the present invention can be any protein selected from the group consisting of the proteins as defined below in (19αA-a) to (19αA-e) and (19αB):
[0939] (19αA-a) a protein comprising an amino acid sequence with deletion, substitution, insertion or addition of one or several amino acids in SEQ ID NO: 341;
[0940] (19αA-b) a protein comprising an amino acid sequence having at least 70%, preferably at least 75%, at least 80%, at least 85%, at least 90%, at least 95%, at least 97%, at least 98%, or at least 99% identity to the amino acid sequence of SEQ ID NO: 341;
[0941] (19αA-c) a protein comprising an amino acid sequence encoded by a nucleotide sequence with deletion, substitution, insertion or addition of one or several nucleotides in SEQ ID NO: 340;
[0942] (19αA-d) a protein comprising an amino acid sequence encoded by a nucleotide sequence having at least 70%, preferably at least 75%, at least 80%, at least 85%, at least 90%, at least 95%, at least 97%, at least 98%, or at least 99% identity to the nucleotide sequence of SEQ ID NO: 340;
[0943] (19αA-e) a protein comprising an amino acid sequence encoded by a nucleic acid that hybridizes under stringent conditions with a nucleic acid having a nucleotide sequence complementary to the nucleotide sequence of SEQ ID NO: 340;
[0944] (19αB) a protein comprising at least one amino acid sequence selected from the group consisting of SEQ ID NOs: 342-346, preferably a protein comprising at least 2, 3 or 4 or all sequences of the amino acid sequences. As referred to above, the amino acid sequence of any of SEQ ID NOs: 342-346 may be an amino acid sequence derived therefrom by deletion, substitution, insertion or addition of one or several amino acids.

[0945] The proteins selected from the group consisting of (19αA-a) to (19αA-e) and (19αB) as defined above can be proteins that are found in a protein spot with a molecular weight of around 30 to 90 kDa, preferably around 40 to 80 kDa and an isoelectric point of 3.5 to 8.5, preferably 4.0 to 8.0 on gels used in the two-dimensional electrophoresis performed under the conditions described above in the subsection titled “Identification of antigens”.

[0946] Epitopes of the antigen in spot 19α reside in amino acids 191-205 (SEQ ID NO: 778), amino acids 475-489 (SEQ ID NO: 781), amino acids 81-95 (SEQ ID NO: 784), amino acids 436-450 (SEQ ID NO: 786), amino acids 21-30 (SEQ ID NO: 787) of SEQ ID NO: 341. The antigen in spot 19α may retain the sequence in SEQ ID NO: 341 as to amino acids at positions corresponding to the region of at least one of these epitopes.

[0947] From the viewpoint of improving sensitivity (a degree to which a patient can be diagnosed as being positive) or specificity (a degree to which a healthy subject is not diagnosed as being positive), the antigen in spot 19α may be the following variant.

[0948] In the epitope having the sequence of SEQ ID NO: 778, sites of amino acids other than X in SEQ ID NO: 776 or 778 are important for binding to IgE antibodies from allergic patients. Thus, in another preferred mode, amino acids 191-205 of SEQ ID NO: 341 in the antigen in spot 19α may have the amino acid sequence of SEQ ID NO: 776 or 778.

[0949] In the epitope having the sequence of SEQ ID NO: 781, sites of amino acids other than X in SEQ ID NO: 779 or 780 are important for binding to IgE antibodies from allergic patients. Thus, in another preferred mode, amino acids 475-489 of SEQ ID NO: 341 in the antigen in spot 19α may have the amino acid sequence of SEQ ID NO: 779 or 780.

[0950] In the epitope having the sequence of SEQ ID NO: 784, sites of amino acids other than X in SEQ ID NO: 782 or 783 are important for binding to IgE antibodies from allergic patients. Thus, in another preferred mode, amino acids 81-95 of SEQ ID NO: 341 in the antigen in spot 19α may have the amino acid sequence of SEQ ID NO: 782 or 783.

[0951] Preferably, a protein that is an antigen in spot 19α has activity equivalent to that of the protein having the amino acid sequence of SEQ ID NO: 341 (sucrose binding protein homolog S-64) or causative of an allergy to soybean.

[0952] (25α) Antigen in Spot 25α

[0953] As the result of sequence identification of the antigen in spot 25α by mass spectroscopy, the amino acid sequences of SEQ ID NOs: 349-365 were detected.

[0954] Also, the mass spectroscopic data obtained for spot 25α on a mass spectrometer was analyzed by comparing the data against the NCBI protein data, and as a result, succinyl-CoA ligase [ADP-forming] subunit beta, mitochondrial (amino acid sequence: SEQ ID NO: 348, encoding nucleotide sequence: SEQ ID NO: 347) was identified as a protein comprising any of SEQ ID NOs: 349 to 356 and succinyl-CoA ligase [ADP-forming] subunit beta, mitochondrial (amino acid sequence: SEQ ID NO: 358, encoding nucleotide sequence: SEQ ID NO: 357) was identified as a protein comprising any of SEQ ID NOs: 359 to 365.

[0955] Accordingly, the antigen in spot 25α in the present invention can be any of proteins selected from the group consisting of the proteins as defined below in (25αA1-a) to (25αA1-e), (25αB1), (25αA2-a) to (25αA2-e), and (25αB2): (25αA1-a) a protein comprising an amino acid sequence with deletion, substitution, insertion or addition of one or several amino acids in SEQ ID NO: 348;
[0956] (25αA1-b) a protein comprising an amino acid sequence having at least 70%, preferably at least 75%, at least 80%, at least 85%, at least 90%, at least 95%, at least 97%, at least 98%, or at least 99% identity to the amino acid sequence of SEQ ID NO: 348;
[0957] (25αA1-c) a protein comprising an amino acid sequence encoded by a nucleotide sequence with deletion, substitution, insertion or addition of one or several nucleotides in SEQ ID NO: 347;
[0958] (25αA1-d) a protein comprising an amino acid sequence encoded by a nucleotide sequence having at least 70%, preferably at least 75%, at least 80%, at least 85%, at least 90%, at least 95%, at least 97%, at least 98%, or at least 99% identity to the nucleotide sequence of SEQ ID NO: 347;
[0959] (25αA1-e) a protein comprising an amino acid sequence encoded by a nucleic acid that hybridizes under stringent conditions with a nucleic acid having a nucleotide sequence complementary to the nucleotide sequence of SEQ ID NO: 347;
[0960] (25αB1) a protein comprising at least one amino acid sequence selected from the group consisting of SEQ ID NOs: 349-356, preferably a protein comprising at least 2, 3, 4, 5, 6, or 7 or all sequences of the amino acid sequences. As referred to above, the amino acid sequence of any of SEQ ID NOs: 349 to 356 may be an amino acid sequence derived therefrom by deletion, substitution, insertion or addition of one or several amino acids;
[0961] (25αA2-a) a protein comprising an amino acid sequence with deletion, substitution, insertion or addition of one or several amino acids in SEQ ID NO: 358;
[0962] (25αA2-b) a protein comprising an amino acid sequence having at least 70%, preferably at least 75%, at least 80%, at least 85%, at least 90%, at least 95%, at least 97%, at least 98%, or at least 99% identity to the amino acid sequence of SEQ ID NO: 358;
[0963] (25αA2-c) a protein comprising an amino acid sequence encoded by a nucleotide sequence with deletion, substitution, insertion or addition of one or several nucleotides in SEQ ID NO: 357;
[0964] (25αA2-d) a protein comprising an amino acid sequence encoded by a nucleotide sequence having at least 70%, preferably at least 75%, at least 80%, at least 85%, at least 90%, at least 95%, at least 97%, at least 98%, or at least 99% identity to the nucleotide sequence of SEQ ID NO: 357;
[0965] (25αA2-e) a protein comprising an amino acid sequence encoded by a nucleic acid that hybridizes under stringent conditions with a nucleic acid having a nucleotide sequence complementary to the nucleotide sequence of SEQ ID NO: 357;
[0966] (25αB2) a protein comprising at least one amino acid sequence selected from the group consisting of SEQ ID NOs: 359-365, preferably a protein comprising at least 2, 3, 4, 5, or 6 or all sequences of the amino acid sequences. As referred to above, the amino acid sequence of any of SEQ ID NOs: 359 to 365 may be an amino acid sequence derived therefrom by deletion, substitution, insertion or addition of one or several amino acids.

[0967] The protein selected from the group consisting of the proteins as defined above in (25αA1-a) to (25αA1-e), (25αB1), (25αA2-a) to (25αA2-e), and (25αB2) can be proteins that are found in a protein spot with a molecular weight of around 20 to 90 kDa, preferably around 30 to 80 kDa, and an isoelectric point of 3.5 to 7.5, preferably 4.0 to 7.0 on gels used in the two-dimensional electrophoresis performed under the conditions described above in the subsection titled “Identification of antigens”.

[0968] Epitopes of the aforementioned antigens (25αA1-a) to (25αA1-e) and (25αB1) reside in amino acids 241-255 (SEQ ID NO: 814) and amino acids 321-335 (SEQ ID NO: 815) of SEQ ID NO: 348. When the antigen in spot 25α contains a variation in the amino acid sequence of SEQ ID NO: 348, this antigen may retain the sequence in SEQ ID NO: 348 as to amino acids at positions corresponding to the region of at least one of these epitopes.

[0969] Preferably, a protein that is an antigen in spot 25α has activity equivalent to that of the protein having the amino acid sequence of SEQ ID NO: 348 or 358 (succinyl-CoA ligase [ADP-forming] subunit beta, mitochondrial) or causative of an allergy to soybean.

[0970] (26α) Antigen in Spot 26α

[0971] As the result of sequence identification of the antigen in spot 26α by mass spectroscopy, the amino acid sequences of SEQ ID NOs: 368-409 were detected.

[0972] Also, the mass spectroscopic data obtained for spot 26α on a mass spectrometer was analyzed by comparing the data against the NCBI protein data, and as a result, phosphoglycerate kinase, cytosolic (amino acid sequence: SEQ ID NO: 367, encoding nucleotide sequence: SEQ ID NO: 366) was identified as a protein comprising any of SEQ ID NOs: 368 to 382, phosphoglycerate kinase, cytosolic (amino acid sequence: SEQ ID NO: 384, encoding nucleotide sequence: SEQ ID NO: 383) was identified as a protein comprising any of SEQ ID NOs: 385 to 392, and phosphoglycerate kinase, cytosolic (amino acid sequence: SEQ ID NO: 394, encoding nucleotide sequence: SEQ ID NO: 393) was identified as a protein comprising any of SEQ ID NOs: 395 to 409.

[0973] Accordingly, the antigen in spot 26α in the present invention can be any of proteins selected from the group consisting of the proteins as defined below in (26αA1-a) to (26αA1-e), (26αB1), (26αA2-a) to (26αA2-e), (26αB2), (26αA3-a) to (26αA3-e), and (26αB3):
[0974] (26αA1-a) a protein comprising an amino acid sequence with deletion, substitution, insertion or addition of one or several amino acids in SEQ ID NO: 367;
[0975] (26αA1-b) a protein comprising an amino acid sequence having at least 70%, preferably at least 75%, at least 80%, at least 85%, at least 90%, at least 95%, at least 97%, at least 98%, or at least 99% identity to the amino acid sequence of SEQ ID NO: 367;
[0976] (26αA1-c) a protein comprising an amino acid sequence encoded by a nucleotide sequence with deletion, substitution, insertion or addition of one or several nucleotides in SEQ ID NO: 366;
[0977] (26αA1-d) a protein comprising an amino acid sequence encoded by a nucleotide sequence having at least 70%, preferably at least 75%, at least 80%, at least 85%, at least 90%, at least 95%, at least 97%, at least 98%, or at least 99% identity to the nucleotide sequence of SEQ ID NO: 366;
[0978] (26αA1-e) a protein comprising an amino acid sequence encoded by a nucleic acid that hybridizes under stringent conditions with a nucleic acid having a nucleotide sequence complementary to the nucleotide sequence of SEQ ID NO: 366;
[0979] (26αB 1) a protein comprising at least one amino acid sequence selected from the group consisting of SEQ ID NOs: 368-382, preferably a protein comprising at least 2, 3, 4, 5, 6, 7, 8, 9, 10, 11, 12, 13, or 14 or all sequences of the amino acid sequences. As referred to above, the amino acid sequence of any of SEQ ID NOs: 368 to 382 may be an amino acid sequence derived therefrom by deletion, substitution, insertion or addition of one or several amino acids;
[0980] (26αA2-a) a protein comprising an amino acid sequence with deletion, substitution, insertion or addition of one or several amino acids in SEQ ID NO: 384;
[0981] (26αA2-b) a protein comprising an amino acid sequence having at least 70%, preferably at least 75%, at least 80%, at least 85%, at least 90%, at least 95%, at least 97%, at least 98%, or at least 99% identity to the amino acid sequence of SEQ ID NO: 384;
[0982] (26αA2-c) a protein comprising an amino acid sequence encoded by a nucleotide sequence with deletion, substitution, insertion or addition of one or several nucleotides in SEQ ID NO: 383;
[0983] (26αA2-d) a protein comprising an amino acid sequence encoded by a nucleotide sequence having at least 70%, preferably at least 75%, at least 80%, at least 85%, at least 90%, at least 95%, at least 97%, at least 98%, or at least 99% identity to the nucleotide sequence of SEQ ID NO: 383;
[0984] (26αA2-e) a protein comprising an amino acid sequence encoded by a nucleic acid that hybridizes under stringent conditions with a nucleic acid having a nucleotide sequence complementary to the nucleotide sequence of SEQ ID NO: 383;
[0985] (26αB2) a protein comprising at least one amino acid sequence selected from the group consisting of SEQ ID NOs: 385-392, preferably a protein comprising at least 2, 3, 4, 5, 6, or 7 or all sequences of the amino acid sequences. As referred to above, the amino acid sequence of any of SEQ ID NOs: 385 to 392 may be an amino acid sequence derived therefrom by deletion, substitution, insertion or addition of one or several amino acids.
[0986] (26αA3-a) a protein comprising an amino acid sequence with deletion, substitution, insertion or addition of one or several amino acids in SEQ ID NO: 394;
[0987] (26αA3-b) a protein comprising an amino acid sequence having at least 70%, preferably at least 75%, at least 80%, at least 85%, at least 90%, at least 95%, at least 97%, at least 98%, or at least 99% identity to the amino acid sequence of SEQ ID NO: 394;
[0988] (26αA3-c) a protein comprising an amino acid sequence encoded by a nucleotide sequence with deletion, substitution, insertion or addition of one or several nucleotides in SEQ ID NO: 393;
[0989] (26αA3-d) a protein comprising an amino acid sequence encoded by a nucleotide sequence having at least 70%, preferably at least 75%, at least 80%, at least 85%, at least 90%, at least 95%, at least 97%, at least 98%, or at least 99% identity to the nucleotide sequence of SEQ ID NO: 393;
[0990] (26αA3-e) a protein comprising an amino acid sequence encoded by a nucleic acid that hybridizes under stringent conditions with a nucleic acid having a nucleotide sequence complementary to the nucleotide sequence of SEQ ID NO: 393;
[0991] (26αB3) a protein comprising at least one amino acid sequence selected from the group consisting of SEQ ID NOs: 395-409, preferably a protein comprising at least 2, 3, 4, 5, 6, 7, 8, 9, 10, 11, 12, 13, or 14 or all sequences of the amino acid sequences. As referred to above, the amino acid sequence of any of SEQ ID NOs: 395 to 409 may be an amino acid sequence derived therefrom by deletion, substitution, insertion or addition of one or several amino acids.

[0992] The protein selected from the group consisting of the proteins as defined above in (26αA1-a) to (26αA1-e), (26αB1), (26αA2-a) to (26αA2-e), (26αB2), (26αA3-a) to (26αA3-e), and (26αB3) can be proteins that are found in a protein spot with a molecular weight of around 20 to 90 kDa, preferably around 30 to 80 kDa, and an isoelectric point of 3.5 to 7.5, preferably 4.0 to 7.0 on gels used in the two-dimensional electrophoresis performed under the conditions described above in the subsection titled “Identification of antigens”. Epitopes of the aforementioned antigens (26αA1-a) to (26αA1-e) and (26αB1) reside in amino acids 121-135 (SEQ ID NO: 816) and amino acids 329-335 (SEQ ID NO: 819) of SEQ ID NO: 367. When the antigen in spot 26α contains a variation in the amino acid sequence of SEQ ID NO: 367, this antigen may retain the sequence in SEQ ID NO: 361 as to amino acids at positions corresponding to the region of at least one of these epitopes.

[0993] From the viewpoint of improving sensitivity (a degree to which a patient can be diagnosed as being positive) or specificity (a degree to which a healthy subject is not diagnosed as being positive), the antigen in spot 26α may be the following variant.

[0994] In the epitope having the sequence of SEQ ID NO: 819, sites of amino acids other than X in SEQ ID NO: 817 or 818 are important for binding to IgE antibodies from allergic patients. Thus, in another preferred mode, when the antigen in spot 26α contains a variation in the amino acid sequence of SEQ ID NO: 367, amino acids 329-335 of SEQ ID NO: 367 in this antigen may have the amino acid sequence of SEQ ID NO: 817 or 818.

[0995] Preferably, a protein that is an antigen in spot 25α has activity equivalent to that of the protein having the amino acid sequence of SEQ ID NO: 367, 384, or 394 (phosphoglycerate kinase, cytosolic) or causative of an allergy to soybean.

[0996] (27α) Antigen in Spot 27α

[0997] As the result of sequence identification of the antigen in spot 27α by mass spectroscopy, the amino acid sequences of SEQ ID NOs: 412-427 were detected.

[0998] Also, the mass spectroscopic data obtained for spot 27α on a mass spectrometer was analyzed by comparing the data against the NCBI protein data, and as a result, alcohol dehydrogenase 1 (amino acid sequence: SEQ ID NO: 411, encoding nucleotide sequence: SEQ ID NO: 410) was identified as a protein comprising any of SEQ ID NOs: 412 to 416, alcohol dehydrogenase 1 (amino acid sequence: SEQ ID NO: 418, encoding nucleotide sequence: SEQ ID NO: 417) was identified as a protein comprising any of SEQ ID NOs: 419 and 420, and alcohol dehydrogenase 1-like (amino acid sequence: SEQ ID NO: 422, encoding nucleotide sequence: SEQ ID NO: 421) was identified as a protein comprising any of SEQ ID NOs: 423 to 427.

[0999] Accordingly, the antigen in spot 27α in the present invention can be any of proteins selected from the group consisting of the proteins as defined below in (27αA1-a) to (27αA1-e), (27αB1), (27αA2-a) to (27αA2-e), (27αB2), (27αA3-a) to (27αA3-e), and (27αB3):
[1000] (27αA1-a) a protein comprising an amino acid sequence with deletion, substitution, insertion or addition of one or several amino acids in SEQ ID NO: 411;
[1001] (27αA1-b) a protein comprising an amino acid sequence having at least 70%, preferably at least 75%, at least 80%, at least 85%, at least 90%, at least 95%, at least 97%, at least 98%, or at least 99% identity to the amino acid sequence of SEQ ID NO: 411;
[1002] (27αA1-c) a protein comprising an amino acid sequence encoded by a nucleotide sequence with deletion, substitution, insertion or addition of one or several nucleotides in SEQ ID NO: 410;
[1003] (27αA1-d) a protein comprising an amino acid sequence encoded by a nucleotide sequence having at least 70%, preferably at least 75%, at least 80%, at least 85%, at least 90%, at least 95%, at least 97%, at least 98%, or at least 99% identity to the nucleotide sequence of SEQ ID NO: 410;
[1004] (27αA1-e) a protein comprising an amino acid sequence encoded by a nucleic acid that hybridizes under stringent conditions with a nucleic acid having a nucleotide sequence complementary to the nucleotide sequence of SEQ ID NO: 410;
[1005] (27αB1) a protein comprising at least one amino acid sequence selected from the group consisting of SEQ ID NOs: 412-416, preferably a protein comprising at least 2, 3, or 4 or all sequences of the amino acid sequences. As referred to above, the amino acid sequence of any of SEQ ID NOs: 412 to 416 may be an amino acid sequence derived therefrom by deletion, substitution, insertion or addition of one or several amino acids;
[1006] (27αA2-a) a protein comprising an amino acid sequence with deletion, substitution, insertion or addition of one or several amino acids in SEQ ID NO: 418;
[1007] (27αA2-b) a protein comprising an amino acid sequence having at least 70%, preferably at least 75%, at least 80%, at least 85%, at least 90%, at least 95%, at least 97%, at least 98%, or at least 99% identity to the amino acid sequence of SEQ ID NO: 418;
[1008] (27αA2-c) a protein comprising an amino acid sequence encoded by a nucleotide sequence with deletion, substitution, insertion or addition of one or several nucleotides in SEQ ID NO: 417;
[1009] (27αA2-d) a protein comprising an amino acid sequence encoded by a nucleotide sequence having at least 70%, preferably at least 75%, at least 80%, at least 85%, at least 90%, at least 95%, at least 97%, at least 98%, or at least 99% identity to the nucleotide sequence of SEQ ID NO: 417;
[1010] (27αA2-e) a protein comprising an amino acid sequence encoded by a nucleic acid that hybridizes under stringent conditions with a nucleic acid having a nucleotide sequence complementary to the nucleotide sequence of SEQ ID NO: 417;
[1011] (27αB2) a protein comprising at least one amino acid sequence selected from the group consisting of SEQ ID NOs: 419 and 420, preferably a protein comprising both the amino acid sequences. As referred to above, the amino acid sequence of any of SEQ ID NOs: 419, 420 may be an amino acid sequence derived therefrom by deletion, substitution, insertion or addition of one or several amino acids.
[1012] (27αA3-a) a protein comprising an amino acid sequence with deletion, substitution, insertion or addition of one or several amino acids in SEQ ID NO: 422;
[1013] (27αA3-b) a protein comprising an amino acid sequence having at least 70%, preferably at least 75%, at least 80%, at least 85%, at least 90%, at least 95%, at least 97%, at least 98%, or at least 99% identity to the amino acid sequence of SEQ ID NO: 422;
[1014] (27αA3-c) a protein comprising an amino acid sequence encoded by a nucleotide sequence with deletion, substitution, insertion or addition of one or several nucleotides in SEQ ID NO: 421;
[1015] (27αA3-d) a protein comprising an amino acid sequence encoded by a nucleotide sequence having at least 70%, preferably at least 75%, at least 80%, at least 85%, at least 90%, at least 95%, at least 97%, at least 98%, or at least 99% identity to the nucleotide sequence of SEQ ID NO: 421;
[1016] (27αA3-e) a protein comprising an amino acid sequence encoded by a nucleic acid that hybridizes under stringent conditions with a nucleic acid having a nucleotide sequence complementary to the nucleotide sequence of SEQ ID NO: 421;
[1017] (27αB3) a protein comprising at least one amino acid sequence selected from the group consisting of SEQ ID NOs: 423-427, preferably a protein comprising at least 2, 3, or 4 or all sequences of the amino acid sequences. As referred to above, the amino acid sequence of any of SEQ ID NOs: 423 to 427 may be an amino acid sequence derived therefrom by deletion, substitution, insertion or addition of one or several amino acids.

[1018] The protein selected from the group consisting of the proteins as defined above in (27αA1-a) to (27αA1-e), (27αB1), (27αA2-a) to (27αA2-e), (27αB2), (27αA3-a) to (27αA3-e), and (27αB3) can be proteins that are found in a protein spot with a molecular weight of around 20 to 90 kDa, preferably around 30 to 80 kDa, and an isoelectric point of 3.5 to 7.5, preferably 4.0 to 7.0 on gels used in the two-dimensional electrophoresis performed under the conditions described above in the subsection titled “Identification of antigens”.

[1019] Epitopes of the aforementioned antigens (27αA1-a) to (27αA1-e) and (27αB1) reside in amino acids 21-35 (SEQ ID NO: 820) of SEQ ID NO: 411. When the antigen in spot 27α contains a variation in the amino acid sequence of SEQ ID NO: 411, this antigen may retain the sequence in SEQ ID NO: 411 as to amino acids at positions corresponding to the region of this epitope.

[1020] Preferably, a protein that is an antigen in spot 27α has activity equivalent to that of the protein having the amino acid sequence of SEQ ID NO: 411 or 418 (alcohol dehydrogenase 1) or the protein having the amino acid sequence of SEQ ID NO: 422 (alcohol dehydrogenase 1-like) or causative of an allergy to soybean.

[1021] (28α) Antigen in Spot 28α

[1022] As the result of sequence identification of the antigen in spot 28α by mass spectroscopy, the amino acid sequences of SEQ ID NOs: 430-433 were detected.

[1023] Also, the mass spectroscopic data obtained for spot 28α on a mass spectrometer was analyzed by comparing the data against the NCBI protein data, and as a result, 35 kDa seed maturation protein isoform X1 (amino acid sequence: SEQ ID NO: 429, encoding nucleotide sequence: SEQ ID NO: 428) was identified as a protein comprising any of SEQ ID NO: 430 to 433.

[1024] Accordingly, the antigens in spot 28α in the present invention can be any protein selected from the group consisting of the proteins as defined below in (28αA-a) to (28αA-e) and (28αB):
[1025] (28αA-a) a protein comprising an amino acid sequence with deletion, substitution, insertion or addition of one or several amino acids in SEQ ID NO: 429;
[1026] (28αA-b) a protein comprising an amino acid sequence having at least 70%, preferably at least 75%, at least 80%, at least 85%, at least 90%, at least 95%, at least 97%, at least 98%, or at least 99% identity to the amino acid sequence of SEQ ID NO: 429;
[1027] (28αA-c) a protein comprising an amino acid sequence encoded by a nucleotide sequence with deletion, substitution, insertion or addition of one or several nucleotides in SEQ ID NO: 428;
[1028] (28αA-d) a protein comprising an amino acid sequence encoded by a nucleotide sequence having at least 70%, preferably at least 75%, at least 80%, at least 85%, at least 90%, at least 95%, at least 97%, at least 98%, or at least 99% identity to the nucleotide sequence of SEQ ID NO: 428;
[1029] (28αA-e) a protein comprising an amino acid sequence encoded by a nucleic acid that hybridizes under stringent conditions with a nucleic acid having a nucleotide sequence complementary to the nucleotide sequence of SEQ ID NO: 428;
[1030] (28αB) a protein comprising at least one amino acid sequence selected from the group consisting of SEQ ID NOs: 430-433, preferably a protein comprising at least 2 or 3 or all sequences of the amino acid sequences. As referred to above, the amino acid sequence of any of SEQ ID NOs: 430-433 may be an amino acid sequence derived therefrom by deletion, substitution, insertion or addition of one or several amino acids.

[1031] The proteins selected from the group consisting of (28αA-a) to (28αA-e) and (28αB) as defined above can be proteins that are found in a protein spot with a molecular weight of around 10 to 70 kDa, preferably around 20 to 60 kDa and an isoelectric point of 3.5 to 7.5, preferably 4.0 to 7.0 on gels used in the two-dimensional electrophoresis performed under the conditions described above in the subsection titled “Identification of antigens”.

[1032] Epitopes of the antigen in spot 28α reside in amino acids 76-85(SEQ ID NO: 820), amino acids 191-205 (SEQ ID NO: 826), amino acids 231-245 (SEQ ID NO: 829), amino acids 111-125 (SEQ ID NO: 830), amino acids 131-145 (SEQ ID NO: 831), amino acids 161-175 (SEQ ID NO: 832), amino acids 181-195 (SEQ ID NO: 833), amino acids 291-305 (SEQ ID NO: 834), amino acids 295-309 (SEQ ID NO: 835) of SEQ ID NO: 429. The antigen in spot 28α may retain the sequence in SEQ ID NO: 429 as to amino acids at positions corresponding to the region of at least one of these epitopes.

[1033] From the viewpoint of improving sensitivity (a degree to which a patient can be diagnosed as being positive) or specificity (a degree to which a healthy subject is not diagnosed as being positive), the antigen in spot 28α may be the following variant.

[1034] In the epitope having the sequence of SEQ ID NO: 823, sites of amino acids other than X in SEQ ID NO: 821 or 822 are important for binding to IgE antibodies from allergic patients. Thus, in another preferred mode, amino acids 76-85 of SEQ ID NO: 429 in the antigen in spot 28α may have the amino acid sequence of SEQ ID NO: 821 or 822.

[1035] In the epitope having the sequence of SEQ ID NO: 826, sites of amino acids other than X in SEQ ID NO: 824 or 825 are important for binding to IgE antibodies from allergic patients. Thus, in another preferred mode, amino acids 191-205 of SEQ ID NO: 429 in the antigen in spot 28α may have the amino acid sequence of SEQ ID NO: 824 or 825.

[1036] In the epitope having the sequence of SEQ ID NO: 829, sites of amino acids other than X in SEQ ID NO: 827 or 828 are important for binding to IgE antibodies from allergic patients. Thus, in another preferred mode, amino acids 231-2455 of SEQ ID NO: 429 in the antigen in spot 28α may have the amino acid sequence of SEQ ID NO: 827 or 828.

[1037] Preferably, a protein that is an antigen in spot 28α has activity equivalent to that of the protein having the amino acid sequence of SEQ ID NO: 422 (35 kDa seed maturation protein isoform X1) or causative of an allergy to soybean.

[1038] (29α, 30α, 31α, 32α, 33α) Antigens in spots 29α to 33a

[1039] As the result of sequence identification of the antigens in spots 29α to 33α by mass spectroscopy, the amino acid sequences of SEQ ID NOs: 436-451 were detected.

[1040] Also, the mass spectroscopic data obtained for spots 29α to 33α on a mass spectrometer was analyzed by comparing the data against the NCBI protein data, and as a result, glyceraldehyde-3-phosphate dehydrogenase isoform X1 (amino acid sequence: SEQ ID NO: 435, encoding nucleotide sequence: SEQ ID NO: 434) was identified as a protein comprising any of SEQ ID NO: 436 to 439, glyceraldehyde-3-phosphate dehydrogenase, cytosolic (amino acid sequence: SEQ ID NO: 441, encoding nucleotide sequence: SEQ ID NO: 440) was identified as a protein comprising any of SEQ ID NO: 442 to 445, and uncharacterized protein LOC100782924 (amino acid sequence: SEQ ID NO: 447, encoding nucleotide sequence: SEQ ID NO: 446) was identified as a protein comprising any of SEQ ID NO: 448 to 451.

[1041] Accordingly, the antigen in spot 29α to 33α in the present invention can be any of proteins selected from the group consisting of the proteins as defined below in (29-33αA1-a) to (29-33αA1-e), (29-33αB1), (29-33αA2-a) to (29-33αA2-e), (29-33αB2), (29-33αA3-a) to (29-33αA3-e), and (29-33αB3): (29-33αA1-a) a protein comprising an amino acid sequence with deletion, substitution, insertion or addition of one or several amino acids in SEQ ID NO: 435;
[1042] (29-33αA1-b) a protein comprising an amino acid sequence having at least 70%, preferably at least 75%, at least 80%, at least 85%, at least 90%, at least 95%, at least 97%, at least 98%, or at least 99% identity to the amino acid sequence of SEQ ID NO: 435;
[1043] (29-33αA1-c) a protein comprising an amino acid sequence encoded by a nucleotide sequence with deletion, substitution, insertion or addition of one or several nucleotides in SEQ ID NO: 434;
[1044] (29-33αA1-d) a protein comprising an amino acid sequence encoded by a nucleotide sequence having at least 70%, preferably at least 75%, at least 80%, at least 85%, at least 90%, at least 95%, at least 97%, at least 98%, or at least 99% identity to the nucleotide sequence of SEQ ID NO: 434;
[1045] (29-33αA1-e) a protein comprising an amino acid sequence encoded by a nucleic acid that hybridizes under stringent conditions with a nucleic acid having a nucleotide sequence complementary to the nucleotide sequence of SEQ ID NO: 434;
[1046] (29-33αB 1) a protein comprising at least one amino acid sequence selected from the group consisting of SEQ ID NOs: 436-439, preferably a protein comprising at least 2, 3, or all sequences of the amino acid sequences. As referred to above, the amino acid sequence of any of SEQ ID NOs: 436 to 439 may be an amino acid sequence derived therefrom by deletion, substitution, insertion or addition of one or several amino acids;
[1047] (29-33αA2-a) a protein comprising an amino acid sequence with deletion, substitution, insertion or addition of one or several amino acids in SEQ ID NO: 441;
[1048] (29-33αA2-b) a protein comprising an amino acid sequence having at least 70%, preferably at least 75%, at least 80%, at least 85%, at least 90%, at least 95%, at least 97%, at least 98%, or at least 99% identity to the amino acid sequence of SEQ ID NO: 441;
[1049] (29-33αA2-c) a protein comprising an amino acid sequence encoded by a nucleotide sequence with deletion, substitution, insertion or addition of one or several nucleotides in SEQ ID NO: 440;
[1050] (29-33αA2-d) a protein comprising an amino acid sequence encoded by a nucleotide sequence having at least 70%, preferably at least 75%, at least 80%, at least 85%, at least 90%, at least 95%, at least 97%, at least 98%, or at least 99% identity to the nucleotide sequence of SEQ ID NO: 440;
[1051] (29-33αA2-e) a protein comprising an amino acid sequence encoded by a nucleic acid that hybridizes under stringent conditions with a nucleic acid having a nucleotide sequence complementary to the nucleotide sequence of SEQ ID NO: 440;
[1052] (29-33αB2) a protein comprising at least one amino acid sequence selected from the group consisting of SEQ ID NOs: 442-445, preferably a protein comprising at least 2, 3, or all sequences of the amino acid sequences. As referred to above, the amino acid sequence of any of SEQ ID NOs: 442 to 445 may be an amino acid sequence derived therefrom by deletion, substitution, insertion or addition of one or several amino acids.
[1053] (29-33αA3-a) a protein comprising an amino acid sequence with deletion, substitution, insertion or addition of one or several amino acids in SEQ ID NO: 447;
[1054] (29-33αA3-b) a protein comprising an amino acid sequence having at least 70%, preferably at least 75%, at least 80%, at least 85%, at least 90%, at least 95%, at least 97%, at least 98%, or at least 99% identity to the amino acid sequence of SEQ ID NO: 447;
[1055] (29-33αA3-c) a protein comprising an amino acid sequence encoded by a nucleotide sequence with deletion, substitution, insertion or addition of one or several nucleotides in SEQ ID NO: 446;
[1056] (29-33αA3-d) a protein comprising an amino acid sequence encoded by a nucleotide sequence having at least 70%, preferably at least 75%, at least 80%, at least 85%, at least 90%, at least 95%, at least 97%, at least 98%, or at least 99% identity to the nucleotide sequence of SEQ ID NO: 446;
[1057] (29-33αA3-e) a protein comprising an amino acid sequence encoded by a nucleic acid that hybridizes under stringent conditions with a nucleic acid having a nucleotide sequence complementary to the nucleotide sequence of SEQ ID NO: 446;
[1058] (29-33αB3) a protein comprising at least one amino acid sequence selected from the group consisting of SEQ ID NOs: 448-451, preferably a protein comprising at least 2, 3, or all sequences of the amino acid sequences. As referred to above, the amino acid sequence of any of SEQ ID NOs: 448 to 451 may be an amino acid sequence derived therefrom by deletion, substitution, insertion or addition of one or several amino acids.

[1059] The protein selected from the group consisting of the proteins as defined above in (29-33αA1-a) to (29-33αA1-e), (29-33αB1), (29-33αA2-a) to (29-33αA2-e), (29-33αB2), (29-33αA3-a) to (29-33αA3-e), and (29-33αB3) can be proteins that are found in a protein spot with a molecular weight of around 10 to 70 kDa, preferably around 20 to 60 kDa, and an isoelectric point of 3.5 to 8.5, preferably 4.0 to 8.0 on gels used in the two-dimensional electrophoresis performed under the conditions described above in the subsection titled “Identification of antigens”.

[1060] Epitopes of the aforementioned antigens (29-33αA1-a) to (29-33αA1-e) and (29-33αBl) reside in amino acids 66-75 (SEQ ID NO: 838), amino acids 301-315 (SEQ ID NO: 839) of SEQ ID NO: 435. When the antigen in spot 29-33α contains a variation in the amino acid sequence of SEQ ID NO: 435, this antigen may retain the sequence in SEQ ID NO: 435 as to amino acids at positions corresponding to the region of at least one of these epitopes.

[1061] From the viewpoint of improving sensitivity (a degree to which a patient can be diagnosed as being positive) or specificity (a degree to which a healthy subject is not diagnosed as being positive), the antigen in spot 29-33α may be the following variant.

[1062] In the epitope having the sequence of SEQ ID NO: 838, sites of amino acids other than X in SEQ ID NO: 836 or 837 are important for binding to IgE antibodies from allergic patients. Thus, in another preferred mode, when the antigen in spot 29-33α contains a variation in the amino acid sequence of SEQ ID NO: 435, amino acids 66-75 of SEQ ID NO: 435 in this antigen may have the amino acid sequence of SEQ ID NO: 836 or 837.

[1063] Preferably, a protein that is an antigen in any of spots 29α to 33α has activity equivalent to that of the protein having the amino acid sequence of SEQ ID NO: 435 (glyceraldehyde-3-phosphate dehydrogenase isoform X1), the protein having the amino acid sequence of SEQ ID NO: 441 (glyceraldehyde-3-phosphate dehydrogenase, cytosolic), or the protein having the amino acid sequence of SEQ ID NO: 447 (uncharacterized protein LOC100782924) or causative of an allergy to soybean.

[1064] (34α) Antigen in Spot 34α

[1065] As the result of sequence identification of the antigen in spot 34α by mass spectroscopy, the amino acid sequences of SEQ ID NOs: 454-458 were detected.

[1066] Also, the mass spectroscopic data obtained for spot 34α on a mass spectrometer was analyzed by comparing the data against the NCBI protein data, and as a result, bifunctional UDP-glucose 4-epimerase and UDP-xylose 4-epimerase 1-like (amino acid sequence: SEQ ID NO: 453, encoding nucleotide sequence: SEQ ID NO: 452) was identified as a protein comprising SEQ ID NO: 454 and uncharacterized protein LOC100803483 (amino acid sequence: SEQ ID NO: 456, encoding nucleotide sequence: SEQ ID NO: 455) was identified as a protein comprising SEQ ID NO: 457 or 458.

[1067] Accordingly, the antigen in spot 34α in the present invention can be any of proteins selected from the group consisting of the proteins as defined below in (34αA1-a) to (34αA1-e), (34αB1), (34αA2-a) to (34αA2-e), and (34αB2): (34αA1-a) a protein comprising an amino acid sequence with deletion, substitution, insertion or addition of one or several amino acids in SEQ ID NO: 453;

[1068] (34αA1-b) a protein comprising an amino acid sequence having at least 70%, preferably at least 75%, at least 80%, at least 85%, at least 90%, at least 95%, at least 97%, at least 98%, or at least 99% identity to the amino acid sequence of SEQ ID NO: 453;
[1069] (34αA1-c) a protein comprising an amino acid sequence encoded by a nucleotide sequence with deletion, substitution, insertion or addition of one or several nucleotides in SEQ ID NO: 452;
[1070] (34αA1-d) a protein comprising an amino acid sequence encoded by a nucleotide sequence having at least 70%, preferably at least 75%, at least 80%, at least 85%, at least 90%, at least 95%, at least 97%, at least 98%, or at least 99% identity to the nucleotide sequence of SEQ ID NO: 452;
[1071] (34αA1-e) a protein comprising an amino acid sequence encoded by a nucleic acid that hybridizes under stringent conditions with a nucleic acid having a nucleotide sequence complementary to the nucleotide sequence of SEQ ID NO: 452;
[1072] (34αB1) a protein comprising an amino acid sequence of SEQ ID NOs: 454. As referred to above, the amino acid sequence of any of SEQ ID NOs: 464 may be an amino acid sequence derived therefrom by deletion, substitution, insertion or addition of one or several amino acids;
[1073] (34αA2-a) a protein comprising an amino acid sequence with deletion, substitution, insertion or addition of one or several amino acids in SEQ ID NO: 456;
[1074] (34αA2-b) a protein comprising an amino acid sequence having at least 70%, preferably at least 75%, at least 80%, at least 85%, at least 90%, at least 95%, at least 97%, at least 98%, or at least 99% identity to the amino acid sequence of SEQ ID NO: 456;
[1075] (34αA2-c) a protein comprising an amino acid sequence encoded by a nucleotide sequence with deletion, substitution, insertion or addition of one or several nucleotides in SEQ ID NO: 455;
[1076] (34αA2-d) a protein comprising an amino acid sequence encoded by a nucleotide sequence having at least 70%, preferably at least 75%, at least 80%, at least 85%, at least 90%, at least 95%, at least 97%, at least 98%, or at least 99% identity to the nucleotide sequence of SEQ ID NO: 455;
[1077] (34αA2-e) a protein comprising an amino acid sequence encoded by a nucleic acid that hybridizes under stringent conditions with a nucleic acid having a nucleotide sequence complementary to the nucleotide sequence of SEQ ID NO: 455;
[1078] (34αB2) a protein comprising at least one amino acid sequence selected from the group consisting of SEQ ID NOs: 457 and 458, preferably a protein comprising both the amino acid sequences. As referred to above, the amino acid sequence of any of SEQ ID NOs: 457, 458 may be an amino acid sequence derived therefrom by deletion, substitution, insertion or addition of one or several amino acids.

[1079] The protein selected from the group consisting of the proteins as defined above in (34αA1-a) to (34αA1-e), (34αB1), (34αA2-a) to (34αA2-e), and (34αB2) can be proteins that are found in a protein spot with a molecular weight of around 10 to 70 kDa, preferably around 20 to 60 kDa, and an isoelectric point of 5.5 to 10.5, preferably 6.0 to 10.0 on gels used in the two-dimensional electrophoresis performed under the conditions described above in the subsection titled “Identification of antigens”.

[1080] Epitopes of the aforementioned antigens (34αA1-a) to (34αA1-e) and (34αB1) reside in amino acids 61-75 (SEQ ID NO: 842), amino acids 31-45 (SEQ ID NO: 843), amino acids 141-155 (SEQ ID NO: 844), amino acids 221-235 (SEQ ID NO: 845), amino acids 231-245 (SEQ ID NO: 846) of SEQ ID NO: 454. When the antigen in spot 34a contains a variation in the amino acid sequence of SEQ ID NO: 454, this antigen may retain the sequence in SEQ ID NO: 454 as to amino acids at positions corresponding to the region of at least one of these epitopes.

[1081] From the viewpoint of improving sensitivity (a degree to which a patient can be diagnosed as being positive) or specificity (a degree to which a healthy subject is not diagnosed as being positive), the antigen in spot 34α may be the following variant.

[1082] In the epitope having the sequence of SEQ ID NO: 842, sites of amino acids other than X in SEQ ID NO: 840 or 841 are important for binding to IgE antibodies from allergic patients. Thus, in another preferred mode, when the antigen in spot 34α contains a variation in the amino acid sequence of SEQ ID NO: 454, amino acids 61-75 of SEQ ID NO: 454 in this antigen may have the amino acid sequence of SEQ ID NO: 840 or 841.

[1083] Preferably, a protein that is an antigen in spot 34α has activity equivalent to that of the protein having the amino acid sequence of SEQ ID NO: 453 (bifunctional UDP-glucose 4-epimerase and UDP-xylose 4-epimerase 1-like) or the protein having the amino acid sequence of SEQ ID NO: 456 (uncharacterized protein LOC100803483) or causative of an allergy to soybean.

[1084] (35α) Antigen in Spot 35α

[1085] As the result of sequence identification of the antigen in spot 35α by mass spectroscopy, the amino acid sequences of SEQ ID NOs: 461-477 were detected.

[1086] Also, the mass spectroscopic data obtained for spot 35α on a mass spectrometer was analyzed by comparing the data against the NCBI protein data, and as a result, elongation factor 1-alpha (amino acid sequence: SEQ ID NO: 460, encoding nucleotide sequence: SEQ ID NO: 459) was identified as a protein comprising any of SEQ ID NOs: 461 to 466, elongation factor 1-alpha (amino acid sequence: SEQ ID NO: 468, encoding nucleotide sequence: SEQ ID NO: 467) was identified as a protein comprising any of SEQ ID NOs: 469 to 471, and elongation factor-1A isoform X1 (amino acid sequence: SEQ ID NO: 473, encoding nucleotide sequence: SEQ ID NO: 472) was identified as a protein comprising any of SEQ ID NOs: 474 to 477.

[1087] Accordingly, the antigen in spot 35α in the present invention can be any of proteins selected from the group consisting of the proteins as defined below in (35αA1-a) to (35αA1-e), (35αB1), (35αA2-a) to (35αA2-e), (35αB2), (35αA3-a) to (35αA3-e), and (35αB3):
[1088] (35αA1-a) a protein comprising an amino acid sequence with deletion, substitution, insertion or addition of one or several amino acids in SEQ ID NO: 460;
[1089] (35αA1-b) a protein comprising an amino acid sequence having at least 70%, preferably at least 75%, at least 80%, at least 85%, at least 90%, at least 95%, at least 97%, at least 98%, or at least 99% identity to the amino acid sequence of SEQ ID NO: 460;
[1090] (35αA1-c) a protein comprising an amino acid sequence encoded by a nucleotide sequence with deletion, substitution, insertion or addition of one or several nucleotides in SEQ ID NO: 459;
[1091] (35αA1-d) a protein comprising an amino acid sequence encoded by a nucleotide sequence having at least 70%, preferably at least 75%, at least 80%, at least 85%, at least 90%, at least 95%, at least 97%, at least 98%, or at least 99% identity to the nucleotide sequence of SEQ ID NO: 459;
[1092] (35αA1-e) a protein comprising an amino acid sequence encoded by a nucleic acid that hybridizes under stringent conditions with a nucleic acid having a nucleotide sequence complementary to the nucleotide sequence of SEQ ID NO: 459;
[1093] (35αBl) a protein comprising at least one amino acid sequence selected from the group consisting of SEQ ID NOs: 461-466, preferably a protein comprising at least 2, 3, 4, or 5 or all sequences of the amino acid sequences. As referred to above, the amino acid sequence of any of SEQ ID NOs: 412 to 416 may be an amino acid sequence derived therefrom by deletion, substitution, insertion or addition of one or several amino acids;
[1094] (35αA2-a) a protein comprising an amino acid sequence with deletion, substitution, insertion or addition of one or several amino acids in SEQ ID NO: 468;
[1095] (35αA2-b) a protein comprising an amino acid sequence having at least 70%, preferably at least 75%, at least 80%, at least 85%, at least 90%, at least 95%, at least 97%, at least 98%, or at least 99% identity to the amino acid sequence of SEQ ID NO: 468;
[1096] (35αA2-c) a protein comprising an amino acid sequence encoded by a nucleotide sequence with deletion, substitution, insertion or addition of one or several nucleotides in SEQ ID NO: 467;
[1097] (35αA2-d) a protein comprising an amino acid sequence encoded by a nucleotide sequence having at least 70%, preferably at least 75%, at least 80%, at least 85%, at least 90%, at least 95%, at least 97%, at least 98%, or at least 99% identity to the nucleotide sequence of SEQ ID NO: 467;
[1098] (35αA2-e) a protein comprising an amino acid sequence encoded by a nucleic acid that hybridizes under stringent conditions with a nucleic acid having a nucleotide sequence complementary to the nucleotide sequence of SEQ ID NO: 467;
[1099] (35αB2) a protein comprising at least one amino acid sequence selected from the group consisting of SEQ ID NOs: 469-471, preferably a protein comprising at least 2, or all sequences of the amino acid sequences. As referred to above, the amino acid sequence of any of SEQ ID NOs: 469 to 471 may be an amino acid sequence derived therefrom by deletion, substitution, insertion or addition of one or several amino acids.
[1100] (35αA3-a) a protein comprising an amino acid sequence with deletion, substitution, insertion or addition of one or several amino acids in SEQ ID NO: 473;
[1101] (35αA3-b) a protein comprising an amino acid sequence having at least 70%, preferably at least 75%, at least 80%, at least 85%, at least 90%, at least 95%, at least 97%, at least 98%, or at least 99% identity to the amino acid sequence of SEQ ID NO: 473;
[1102] (35αA3-c) a protein comprising an amino acid sequence encoded by a nucleotide sequence with deletion, substitution, insertion or addition of one or several nucleotides in SEQ ID NO: 472;
[1103] (35αA3-d) a protein comprising an amino acid sequence encoded by a nucleotide sequence having at least 70%, preferably at least 75%, at least 80%, at least 85%, at least 90%, at least 95%, at least 97%, at least 98%, or at least 99% identity to the nucleotide sequence of SEQ ID NO: 472;
[1104] (35αA3-e) a protein comprising an amino acid sequence encoded by a nucleic acid that hybridizes under stringent conditions with a nucleic acid having a nucleotide sequence complementary to the nucleotide sequence of SEQ ID NO: 472;
[1105] (35αB3) a protein comprising at least one amino acid sequence selected from the group consisting of SEQ ID NOs: 474-477, preferably a protein comprising at least 2, 3, or all sequences of the amino acid sequences. As referred to above, the amino acid sequence of any of SEQ ID NOs: 474 to 477 may be an amino acid sequence derived therefrom by deletion, substitution, insertion or addition of one or several amino acids.

[1106] The protein selected from the group consisting of the proteins as defined above in (35αA1-a) to (35αA1-e), (35αB1), (35αA2-a) to (35αA2-e), (35αB2), (35αA3-a) to (35αA3-e), and (35αB3) can be proteins that are found in a protein spot with a molecular weight of around 20 to 90 kDa, preferably around 30 to 80 kDa, and an isoelectric point of 5.5 to 10.5, preferably 6.0 to 10.0 on gels used in the two-dimensional electrophoresis performed under the conditions described above in the subsection titled “Identification of antigens”.

[1107] Epitopes of the aforementioned antigens (35αA1-a) to (35αA1-e) and (35αBl) reside in amino acids 31-45 (SEQ ID NO: 849), amino acids 121-135 (SEQ ID NO: 850), amino acids 192-220 (SEQ ID NO: 853), amino acids 216-225 (SEQ ID NO: 856) of SEQ ID NO: 460. When the antigen in spot 35α contains a variation in the amino acid sequence of SEQ ID NO: 460, amino acids at positions corresponding to the region of at least one of these epitopes may retain the sequence in SEQ ID NO: 460.

[1108] From the viewpoint of improving sensitivity (a degree to which a patient can be diagnosed as being positive) or specificity (a degree to which a healthy subject is not diagnosed as being positive), the antigen in spot 35α may be the following variant.

[1109] In the epitope having the sequence of SEQ ID NO: 849, sites of amino acids other than X in SEQ ID NO: 847 or 848 are important for binding to IgE antibodies from allergic patients. Thus, in another preferred mode, when the antigen in spot 35α contains a variation in the amino acid sequence of SEQ ID NO: 460, amino acids 31-45 of SEQ ID NO: 460 in this antigen may have the amino acid sequence of SEQ ID NO: 847 or 848.

[1110] In the epitope having the sequence of SEQ ID NO: 853, sites of amino acids other than X in SEQ ID NO: 851 or 852 are important for binding to IgE antibodies from allergic patients. Thus, in another preferred mode, when the antigen in spot 35α contains a variation in the amino acid sequence of SEQ ID NO: 460, amino acids 192-220 of SEQ ID NO: 460 in this antigen may have the amino acid sequence of SEQ ID NO: 851 or 852.

[1111] In the epitope having the sequence of SEQ ID NO: 856, sites of amino acids other than X in SEQ ID NO: 854 or 855 are important for binding to IgE antibodies from allergic patients. Thus, in another preferred mode, when the antigen in spot 35α contains a variation in the amino acid sequence of SEQ ID NO: 460, amino acids 216-225 of SEQ ID NO: 460 in this antigen may have the amino acid sequence of SEQ ID NO: 854 or. 855.

[1112] Preferably, a protein that is an antigen in spot 35α has activity equivalent to that of the protein having the amino acid sequence of SEQ ID NO: 460 or 468 (elongation factor 1-alpha) or the protein having the amino acid sequence of SEQ ID NO: 473 (elongation factor-1A isoform X1) or causative of an allergy to soybean.

[1113] (36α, 37α) Antigens in Spots 36α, 37α

[1114] As the result of sequence identification of the antigens in spots 36α and 37α by mass spectroscopy, the amino acid sequences of SEQ ID NOs: 480-493 were detected.

[1115] Also, the mass spectroscopic data obtained for spots 36α and 37α on a mass spectrometer was analyzed by comparing the data against the NCBI protein data, and as a result, seed maturation protein PM34 (amino acid sequence: SEQ ID NO: 479, encoding nucleotide sequence: SEQ ID NO: 478) was identified as a protein comprising any of SEQ ID NOs: 480 to 483, uncharacterized protein LOC100809384 (amino acid sequence: SEQ ID NO: 485, encoding nucleotide sequence: SEQ ID NO: 484) was identified as a protein comprising SEQ ID NO: 486 or 487, and hypothetical protein GLYMA_10G155300 (amino acid sequence: SEQ ID NO: 489, encoding nucleotide sequence: SEQ ID NO: 488) was identified as a protein comprising any of SEQ ID NOs: 4490 to 493.

[1116] Accordingly, the antigen in spot 36α, 37α in the present invention can be any of proteins selected from the group consisting of the proteins as defined below in (36, 37αA1-a) to (36, 37αA1-e), (36, 37αB1), (36, 37αA2-a) to (36, 37αA2-e), (36, 37αB2), (36, 37αA3-a) to (36, 37αA3-e), and (36, 37αB3):
[1117] (36, 37αA1-a) a protein comprising an amino acid sequence with deletion, substitution, insertion or addition of one or several amino acids in SEQ ID NO: 479;
[1118] (36, 37αA1-b) a protein comprising an amino acid sequence having at least 70%, preferably at least 75%, at least 80%, at least 85%, at least 90%, at least 95%, at least 97%, at least 98%, or at least 99% identity to the amino acid sequence of SEQ ID NO: 479;
[1119] (36, 37αA1-c) a protein comprising an amino acid sequence encoded by a nucleotide sequence with deletion, substitution, insertion or addition of one or several nucleotides in SEQ ID NO: 478;
[1120] (36, 37αA1-d) a protein comprising an amino acid sequence encoded by a nucleotide sequence having at least 70%, preferably at least 75%, at least 80%, at least 85%, at least 90%, at least 95%, at least 97%, at least 98%, or at least 99% identity to the nucleotide sequence of SEQ ID NO: 478;
[1121] (36, 37αA1-e) a protein comprising an amino acid sequence encoded by a nucleic acid that hybridizes under stringent conditions with a nucleic acid having a nucleotide sequence complementary to the nucleotide sequence of SEQ ID NO: 478;
[1122] (36, 37αB1) a protein comprising at least one amino acid sequence selected from the group consisting of SEQ ID NOs: 480-483, preferably a protein comprising at least 2, 3, or all sequences of the amino acid sequences. As referred to above, the amino acid sequence of any of SEQ ID NOs: 480 to 483 may be an amino acid sequence derived therefrom by deletion, substitution, insertion or addition of one or several amino acids;
[1123] (36, 37αA2-a) a protein comprising an amino acid sequence with deletion, substitution, insertion or addition of one or several amino acids in SEQ ID NO: 485;
[1124] (36, 37αA2-b) a protein comprising an amino acid sequence having at least 70%, preferably at least 75%, at least 80%, at least 85%, at least 90%, at least 95%, at least 97%, at least 98%, or at least 99% identity to the amino acid sequence of SEQ ID NO: 485;
[1125] (36, 37αA2-c) a protein comprising an amino acid sequence encoded by a nucleotide sequence with deletion, substitution, insertion or addition of one or several nucleotides in SEQ ID NO: 484;
[1126] (36, 37αA2-d) a protein comprising an amino acid sequence encoded by a nucleotide sequence having at least 70%, preferably at least 75%, at least 80%, at least 85%, at least 90%, at least 95%, at least 97%, at least 98%, or at least 99% identity to the nucleotide sequence of SEQ ID NO: 484;
[1127] (36, 37αA2-e) a protein comprising an amino acid sequence encoded by a nucleic acid that hybridizes under stringent conditions with a nucleic acid having a nucleotide sequence complementary to the nucleotide sequence of SEQ ID NO: 484;
[1128] (36, 37αB2) a protein comprising at least one amino acid sequence selected from the group consisting of SEQ ID NOs: 486 and 487, preferably a protein comprising both the amino acid sequences. As referred to above, the amino acid sequence of any of SEQ ID NOs: 486, 487 may be an amino acid sequence derived therefrom by deletion, substitution, insertion or addition of one or several amino acids.
[1129] (36, 37αA3-a) a protein comprising an amino acid sequence with deletion, substitution, insertion or addition of one or several amino acids in SEQ ID NO: 489;
[1130] (36, 37αA3-b) a protein comprising an amino acid sequence having at least 70%, preferably at least 75%, at least 80%, at least 85%, at least 90%, at least 95%, at least 97%, at least 98%, or at least 99% identity to the amino acid sequence of SEQ ID NO: 489;
[1131] (36, 37αA3-c) a protein comprising an amino acid sequence encoded by a nucleotide sequence with deletion, substitution, insertion or addition of one or several nucleotides in SEQ ID NO: 488;
[1132] (36, 37αA3-d) a protein comprising an amino acid sequence encoded by a nucleotide sequence having at least 70%, preferably at least 75%, at least 80%, at least 85%, at least 90%, at least 95%, at least 97%, at least 98%, or at least 99% identity to the nucleotide sequence of SEQ ID NO: 488;
[1133] (36, 37αA3-e) a protein comprising an amino acid sequence encoded by a nucleic acid that hybridizes under stringent conditions with a nucleic acid having a nucleotide sequence complementary to the nucleotide sequence of SEQ ID NO: 488;
[1134] (36, 37αB3) a protein comprising at least one amino acid sequence selected from the group consisting of SEQ ID NOs: 490-493, preferably a protein comprising at least 2, 3, or all sequences of the amino acid sequences. As referred to above, the amino acid sequence of any of SEQ ID NOs: 490 to 493 may be an amino acid sequence derived therefrom by deletion, substitution, insertion or addition of one or several amino acids.

[1135] The protein selected from the group consisting of the proteins as defined above in (36, 37αA1-a) to (36, 37αA1-e), (36, 37αB1), (36, 37αA2-a) to (36, 37αA2-e), (36, 37αB2), (36, 37αA3-a) to (36, 37αA3-e), and (36, 37αB3) can be proteins that are found in a protein spot with a molecular weight of around 10 to 70 kDa, preferably around 20 to 60 kDa, and an isoelectric point of 3.5 to 8.5, preferably 4.0 to 8.0 on gels used in the two-dimensional electrophoresis performed under the conditions described above in the subsection titled “Identification of antigens”.

[1136] Epitopes of the aforementioned antigens (36, 37αA1-a) to (36, 37αA1-e) and (36, 37αB1) reside in amino acids 141-155 (SEQ ID NO: 857), amino acids 231-245 (SEQ ID NO: 858), amino acids 7-14 (SEQ ID NO: 861) of SEQ ID NO: 479. When the antigen in spot 36α, 37α contains a variation in the amino acid sequence of SEQ ID NO: 479, this antigen may retain the sequence in SEQ ID NO: 479 as to amino acids at positions corresponding to the region of at least one of these epitopes.

[1137] From the viewpoint of improving sensitivity (a degree to which a patient can be diagnosed as being positive) or specificity (a degree to which a healthy subject is not diagnosed as being positive), the antigen in spot 36α,37α may be the following variant.

[1138] In the epitope having the sequence of SEQ ID NO: 861, sites of amino acids other than X in SEQ ID NO: 859 or 860 are important for binding to IgE antibodies from allergic patients. Thus, in another preferred mode, when the antigen in spot 36α,37α contains a variation in the amino acid sequence of SEQ ID NO: 479, amino acids 7-14 of SEQ ID NO: 479 in this antigen may have the amino acid sequence of SEQ ID NO: 859 or 860.

[1139] Preferably, a protein that is an antigen in spot 36α or 37α has activity equivalent to that of the protein having the amino acid sequence of SEQ ID NO: 479 (seed maturation protein PM34), the protein having the amino acid sequence of SEQ ID NO: 485 (uncharacterized protein LOC100809384), or the protein having the amino acid sequence of SEQ ID NO: 489 (hypothetical protein GLYMA_10G155300) or causative of an allergy to soybean.

[1140] (38α) Antigen in Spot 38α

[1141] As the result of sequence identification of the antigen in spot 38α by mass spectroscopy, the amino acid sequences of SEQ ID NOs: 496-513 were detected.

[1142] Also, the mass spectroscopic data obtained for spot 38α on a mass spectrometer was analyzed by comparing the data against the NCBI protein data, and as a result, seed biotin-containing protein SBP65-like isoform X1 (amino acid sequence: SEQ ID NO: 495, encoding nucleotide sequence: SEQ ID NO: 494) was identified as a protein comprising any of SEQ ID NOs: 496 to 513.

[1143] Accordingly, the antigens in spot 38α in the present invention can be any protein selected from the group consisting of the proteins as defined below in (38αA-a) to (38αA-e) and (38αB):
[1144] (38αA-a) a protein comprising an amino acid sequence with deletion, substitution, insertion or addition of one or several amino acids in SEQ ID NO: 495;
[1145] (38αA-b) a protein comprising an amino acid sequence having at least 70%, preferably at least 75%, at least 80%, at least 85%, at least 90%, at least 95%, at least 97%, at least 98%, or at least 99% identity to the amino acid sequence of SEQ ID NO: 495;
[1146] (38αA-c) a protein comprising an amino acid sequence encoded by a nucleotide sequence with deletion, substitution, insertion or addition of one or several nucleotides in SEQ ID NO: 494;
[1147] (38αA-d) a protein comprising an amino acid sequence encoded by a nucleotide sequence having at least 70%, preferably at least 75%, at least 80%, at least 85%, at least 90%, at least 95%, at least 97%, at least 98%, or at least 99% identity to the nucleotide sequence of SEQ ID NO: 494;
[1148] (38αA-e) a protein comprising an amino acid sequence encoded by a nucleic acid that hybridizes under stringent conditions with a nucleic acid having a nucleotide sequence complementary to the nucleotide sequence of SEQ ID NO: 494;
[1149] (38αB) a protein comprising at least one amino acid sequence selected from the group consisting of SEQ ID NOs: 496-513, preferably a protein comprising at least 2, 3, 4, 5, 6, 7, 8, 9, 10, 11, 12, 13, 14, 15, 16 or 17 or all sequences of the amino acid sequences. As referred to above, the amino acid sequence of any of SEQ ID NOs: 496-513 may be an amino acid sequence derived therefrom by deletion, substitution, insertion or addition of one or several amino acids.

[1150] The proteins selected from the group consisting of (38αA-a) to (38αA-e) and (38αB) as defined above can be proteins that are found in a protein spot with a molecular weight of around 70 to 170 kDa, preferably around 80 to 160 kDa and an isoelectric point of 5.5 to 10.5, preferably 6.0 to 10.0 on gels used in the two-dimensional electrophoresis performed under the conditions described above in the subsection titled “Identification of antigens”.

[1151] Epitopes of the antigen in spot 38α reside in amino acids 440-446 or 574-580 (SEQ ID NO: 864), amino acids 71-80 (SEQ ID NO: 867), amino acids 521-535 (SEQ ID NO: 869), amino acids 1-15 (SEQ ID NO: 871), amino acids 31-45 (SEQ ID NO: 874), amino acids 221-235 (SEQ ID NO: 877), and amino acids 461-470 (SEQ ID NO: 882), and amino acids 481-490 (SEQ ID NO: 884), and amino acids 821-835 (SEQ ID NO: 887), and amino acids 861-870 (SEQ ID NO: 889), and amino acids 1031-1040 (SEQ ID NO: 892) of SEQ ID NO: 495. The antigen in spot 38α may retain the sequence in SEQ ID NO: 495 as to amino acids at positions corresponding to the region of at least one of these epitopes.

[1152] From the viewpoint of improving sensitivity (a degree to which a patient can be diagnosed as being positive) or specificity (a degree to which a healthy subject is not diagnosed as being positive), the antigen in spot 38α may be the following variant.

[1153] In the epitope having the sequence of SEQ ID NO: 864, sites of amino acids other than X in SEQ ID NO: 862 are important for binding to IgE antibodies from allergic patients. Thus, in another preferred mode, amino acids 440-446 and / or 574-580 of SEQ ID NO: 495 in the antigen in spot 38α may have the amino acid sequence of SEQ ID NO: 862.

[1154] In the epitope having the sequence of SEQ ID NO: 867, sites of amino acids other than X in SEQ ID NO: 865 or 866 are important for binding to IgE antibodies from allergic patients. Thus, in another preferred mode, amino acids 71-80 of SEQ ID NO: 495 in the antigen in spot 38α may have the amino acid sequence of SEQ ID NO: 865 or 866.

[1155] In the epitope having the sequence of SEQ ID NO: 869, sites of amino acids other than X in SEQ ID NO: 868 are important for binding to IgE antibodies from allergic patients. Thus, in another preferred mode, amino acids 521-535 of SEQ ID NO: 495 in the antigen in spot 38α may have the amino acid sequence of SEQ ID NO: 868.

[1156] In the epitope having the sequence of SEQ ID NO: 871, sites of amino acids other than X in SEQ ID NO: 870 are important for binding to IgE antibodies from allergic patients. Thus, in another preferred mode, amino acids 1-15 of SEQ ID NO: 495 in the antigen in spot 38α may have the amino acid sequence of SEQ ID NO: 870.

[1157] In the epitope having the sequence of SEQ ID NO: 874, sites of amino acids other than X in SEQ ID NO: 872 or 873 are important for binding to IgE antibodies from allergic patients. Thus, in another preferred mode, amino acids 31-45 of SEQ ID NO: 495 in the antigen in spot 38α may have the amino acid sequence of SEQ ID NO: 872 or 873.

[1158] In the epitope having the sequence of SEQ ID NO: 877, sites of amino acids other than X in SEQ ID NO: 875 or 876 are important for binding to IgE antibodies from allergic patients. Thus, in another preferred mode, amino acids 221-235 of SEQ ID NO: 495 in the antigen in spot 38α may have the amino acid sequence of SEQ ID NO: 875 or 876.

[1159] In the epitope having the sequence of SEQ ID NO: 880, sites of amino acids other than X in SEQ ID NO: 878 or 879 are important for binding to IgE antibodies from allergic patients. Thus, in another preferred mode, amino acids 311-325 of SEQ ID NO: 495 in the antigen in spot 38α may have the amino acid sequence of SEQ ID NO: 878 or 879.

[1160] In the epitope having the sequence of SEQ ID NO: 882, sites of amino acids other than X in SEQ ID NO: 881 are important for binding to IgE antibodies from allergic patients. Thus, in another preferred mode, amino acids 461-470 of SEQ ID NO: 495 in the antigen in spot 38α may have the amino acid sequence of SEQ ID NO: 881.

[1161] In the epitope having the sequence of SEQ ID NO: 884, sites of amino acids other than X in SEQ ID NO: 883 are important for binding to IgE antibodies from allergic patients. Thus, in another preferred mode, amino acids 481-490 of SEQ ID NO: 495 in the antigen in spot 38α may have the amino acid sequence of SEQ ID NO: 883.

[1162] In the epitope having the sequence of SEQ ID NO: 887, sites of amino acids other than X in SEQ ID NO: 885 or 886 are important for binding to IgE antibodies from allergic patients. Thus, in another preferred mode, amino acids 821-835 of SEQ ID NO: 495 in the antigen in spot 38α may have the amino acid sequence of SEQ ID NO: 885 or 886.

[1163] In the epitope having the sequence of SEQ ID NO: 889, sites of amino acids other than X in SEQ ID NO: 888 are important for binding to IgE antibodies from allergic patients. Thus, in another preferred mode, amino acids 861-870 of SEQ ID NO: 495 in the antigen in spot 38α may have the amino acid sequence of SEQ ID NO: 888.

[1164] In the epitope having the sequence of SEQ ID NO: 892, sites of amino acids other than X in SEQ ID NO: 890 or 891 are important for binding to IgE antibodies from allergic patients. Thus, in another preferred mode, amino acids 1031-1040 of SEQ ID NO: 495 in the antigen in spot 38α may have the amino acid sequence of SEQ ID NO: 890 or 891.

[1165] Preferably, a protein that is an antigen in spot 38α has activity equivalent to that of the protein having the amino acid sequence of SEQ ID NO: 495 (seed biotin-containing protein SBP65-like isoform X1) or causative of an allergy to soybean.

[1166] (39α) Antigen in Spot 39α

[1167] As the result of sequence identification of the antigen in spot 39α by mass spectroscopy, the amino acid sequence of SEQ ID NO: 516 was detected.

[1168] Also, the mass spectroscopic data obtained for spot 39α on a mass spectrometer was analyzed by comparing the data against the NCBI protein data, and as a result, ATP synthase subunit O, mitochondrial-like (amino acid sequence: SEQ ID NO: 515, encoding nucleotide sequence: SEQ ID NO: 514) was identified as a protein comprising SEQ ID NO: 516.

[1169] Accordingly, the antigens in spot 39α in the present invention can be any protein selected from the group consisting of the proteins as defined below in (39αA-a) to (39αA-e) and (39αB):
[1170] (39αA-a) a protein comprising an amino acid sequence with deletion, substitution, insertion or addition of one or several amino acids in SEQ ID NO: 515;
[1171] (39αA-b) a protein comprising an amino acid sequence having at least 70%, preferably at least 75%, at least 80%, at least 85%, at least 90%, at least 95%, at least 97%, at least 98%, or at least 99% identity to the amino acid sequence of SEQ ID NO: 515;
[1172] (39αA-c) a protein comprising an amino acid sequence encoded by a nucleotide sequence with deletion, substitution, insertion or addition of one or several nucleotides in SEQ ID NO: 514;
[1173] (39αA-d) a protein comprising an amino acid sequence encoded by a nucleotide sequence having at least 70%, preferably at least 75%, at least 80%, at least 85%, at least 90%, at least 95%, at least 97%, at least 98%, or at least 99% identity to the nucleotide sequence of SEQ ID NO: 514;
[1174] (39αA-e) a protein comprising an amino acid sequence encoded by a nucleic acid that hybridizes under stringent conditions with a nucleic acid having a nucleotide sequence complementary to the nucleotide sequence of SEQ ID NO: 514;
[1175] (39αB) a protein comprising an amino acid sequence of SEQ ID NO: 516. As referred to above, the amino acid sequence(s) of SEQ ID NO: 516 may be an amino acid sequence(s) derived therefrom by deletion, substitution, insertion or addition of one or several amino acids.

[1176] The proteins selected from the group consisting of (39αA-a) to (39αA-e) and (39αB) as defined above can be proteins that are found in a protein spot with a molecular weight of around 5 to 60 kDa, preferably around 10 to 50 kDa and an isoelectric point of 5.5 to 10.5, preferably 6.0 to 10.0 on gels used in the two-dimensional electrophoresis performed under the conditions described above in the subsection titled “Identification of antigens”.

[1177] An epitope of the antigen in spot 39α resides in amino acids 71-85 (SEQ ID NO: 895) of SEQ ID NO: 515. The antigen in spot 39α may retain the sequence in SEQ ID NO: 515 as to amino acids at positions corresponding to the region of this epitope.

[1178] From the viewpoint of improving sensitivity (a degree to which a patient can be diagnosed as being positive) or specificity (a degree to which a healthy subject is not diagnosed as being positive), the antigen in spot 39α may be the following variant.

[1179] In the epitope having the sequence of SEQ ID NO: 895, sites of amino acids other than X in SEQ ID NO: 893 or 894 are important for binding to IgE antibodies from allergic patients. Thus, in another preferred mode, amino acids 71-85 of SEQ ID NO: 515 in the antigen in spot 39α may have the amino acid sequence of SEQ ID NO: 893 or 894.

[1180] Preferably, a protein that is an antigen in spot 39α has activity equivalent to that of the protein having the amino acid sequence of SEQ ID NO: 515 (ATP synthase subunit O, mitochondrial-like) or causative of an allergy to soybean.

[1181] (40α, 56α) Antigens in Spots 40α, 56α

[1182] As the result of sequence identification of the antigens in spots 40α and 56α by mass spectroscopy, the amino acid sequences of SEQ ID NOs: 519 and 520 were detected.

[1183] Also, the mass spectroscopic data obtained for spots 40α and 56α on a mass spectrometer was analyzed by comparing the data against the NCBI protein data, and as a result, P24 oleosin isoform A (amino acid sequence: SEQ ID NO: 518, encoding nucleotide sequence: SEQ ID NO: 517) was identified as a protein comprising SEQ ID NO: 519 or 520.

[1184] Accordingly, the antigens in spot 40α, 56α in the present invention can be any protein selected from the group consisting of the proteins as defined below in (40, 56αA-a) to (40, 56αA-e) and (40, 56αB):
[1185] (40, 56αA-a) a protein comprising an amino acid sequence with deletion, substitution, insertion or addition of one or several amino acids in SEQ ID NO: 518;
[1186] (40, 56αA-b) a protein comprising an amino acid sequence having at least 70%, preferably at least 75%, at least 80%, at least 85%, at least 90%, at least 95%, at least 97%, at least 98%, or at least 99% identity to the amino acid sequence of SEQ ID NO: 518;
[1187] (40, 56αA-c) a protein comprising an amino acid sequence encoded by a nucleotide sequence with deletion, substitution, insertion or addition of one or several nucleotides in SEQ ID NO: 517;
[1188] (40, 56αA-d) a protein comprising an amino acid sequence encoded by a nucleotide sequence having at least 70%, preferably at least 75%, at least 80%, at least 85%, at least 90%, at least 95%, at least 97%, at least 98%, or at least 99% identity to the nucleotide sequence of SEQ ID NO: 517;
[1189] (40, 56αA-e) a protein comprising an amino acid sequence encoded by a nucleic acid that hybridizes under stringent conditions with a nucleic acid having a nucleotide sequence complementary to the nucleotide sequence of SEQ ID NO: 517;
[1190] (40, 56αB) a protein comprising at least one amino acid sequence selected from the group consisting of SEQ ID NOs: 519 and 520, preferably a protein comprising both the amino acid sequences. As referred to above, the amino acid sequence of any of SEQ ID NOs: 519 and 520 may be an amino acid sequence derived therefrom by deletion, substitution, insertion or addition of one or several amino acids.

[1191] The proteins selected from the group consisting of (40, 56αA-a) to (40, 56αA-e) and (40, 56αB) as defined above can be proteins that are found in a protein spot with a molecular weight of around 5 to 60 kDa, preferably around 10 to 50 kDa and an isoelectric point of 5.5 to 10.5, preferably 6.0 to 10.0 on gels used in the two-dimensional electrophoresis performed under the conditions described above in the subsection titled “Identification of antigens”.

[1192] Epitopes of the antigens in spots 40α and 56α reside in amino acids 35-39 (SEQ ID NO: 898), amino acids 191-205 (SEQ ID NO: 899) and amino acids 214-222 (SEQ ID NO: 902) of SEQ ID NO: 518. The antigens in spots 40α and 56α may retain the sequence in SEQ ID NO: 518 as to amino acids at positions corresponding to the region of these epitopes.

[1193] From the viewpoint of improving sensitivity (a degree to which a patient can be diagnosed as being positive) or specificity (a degree to which a healthy subject is not diagnosed as being positive), the antigen in spot 40α, 56α may be the following variant.

[1194] In the epitope having the sequence of SEQ ID NO: 898, sites of amino acids other than X in SEQ ID NO: 896 or 897 are important for binding to IgE antibodies from allergic patients. Thus, in another preferred mode, amino acids 35-39 of SEQ ID NO: 518 in the antigen in spot 40α, 56α may have the amino acid sequence of SEQ ID NO: 896 or 897.

[1195] In the epitope having the sequence of SEQ ID NO: 902, sites of amino acids other than X in SEQ ID NO: 900 or 901 are important for binding to IgE antibodies from allergic patients. Thus, in another preferred mode, amino acids 214-2229 of SEQ ID NO: 518 in the antigen in spot 40α, 56α may have the amino acid sequence of SEQ ID NO: 900 or 901.

[1196] Preferably, a protein that is an antigen in spot 40α or 56α has activity equivalent to that of the protein having the amino acid sequence of SEQ ID NO: 518 (P24 oleosin isoform A) or causative of an allergy to soybean.

[1197] (41α) Antigen in Spot 41α

[1198] As the result of sequence identification of the antigen in spot 41α by mass spectroscopy, the amino acid sequence of SEQ ID NO: 523 was detected.

[1199] Also, the mass spectroscopic data obtained for spot 41α on a mass spectrometer was analyzed by comparing the data against the NCBI protein data, and as a result, uncharacterized protein At3g49720-like isoform X2 (amino acid sequence: SEQ ID NO: 522, encoding nucleotide sequence: SEQ ID NO: 521) was identified as a protein comprising SEQ ID NO: 523.

[1200] Accordingly, the antigens in spot 41α in the present invention can be any protein selected from the group consisting of the proteins as defined below in (41αA-a) to (41αA-e) and (41αB):
[1201] (41αA-a) a protein comprising an amino acid sequence with deletion, substitution, insertion or addition of one or several amino acids in SEQ ID NO: 522;
[1202] (41αA-b) a protein comprising an amino acid sequence having at least 70%, preferably at least 75%, at least 80%, at least 85%, at least 90%, at least 95%, at least 97%, at least 98%, or at least 99% identity to the amino acid sequence of SEQ ID NO: 522;
[1203] (41αA-c) a protein comprising an amino acid sequence encoded by a nucleotide sequence with deletion, substitution, insertion or addition of one or several nucleotides in SEQ ID NO: 521;
[1204] (41αA-d) a protein comprising an amino acid sequence encoded by a nucleotide sequence having at least 70%, preferably at least 75%, at least 80%, at least 85%, at least 90%, at least 95%, at least 97%, at least 98%, or at least 99% identity to the nucleotide sequence of SEQ ID NO: 521;
[1205] (41αA-e) a protein comprising an amino acid sequence encoded by a nucleic acid that hybridizes under stringent conditions with a nucleic acid having a nucleotide sequence complementary to the nucleotide sequence of SEQ ID NO: 521;
[1206] (4 lαB) a protein comprising an amino acid sequence of SEQ ID NO: 523. As referred to above, the amino acid sequence of SEQ ID NO: 523 may be an amino acid sequence derived therefrom by deletion, substitution, insertion or addition of one or several amino acids.

[1207] The proteins selected from the group consisting of (41αA-a) to (41αA-e) and (41αB) as defined above can be proteins that are found in a protein spot with a molecular weight of around 5 to 60 kDa, preferably around 10 to 50 kDa and an isoelectric point of 5.5 to 10.5, preferably 6.0 to 10.0 on gels used in the two-dimensional electrophoresis performed under the conditions described above in the subsection titled “Identification of antigens”.

[1208] An epitope of the antigen in spot 41α resides in amino acids 111-125 (SEQ ID NO: 903) of SEQ ID NO: 522. The antigen in spot 41α may retain the sequence in SEQ ID NO: 522 as to amino acids at positions corresponding to the region of this epitope.

[1209] Preferably, a protein that is an antigen in spot 41α has activity equivalent to that of the protein having the amino acid sequence of SEQ ID NO: 515 (ATP synthase subunit O, mitochondrial-like) or causative of an allergy to soybean.

[1210] (42α, 43α) Antigen in Spots 42α, 43α

[1211] As the result of sequence identification of the antigens in spots 42α and 43α by mass spectroscopy, the amino acid sequences of SEQ ID NOs: 526-539 were detected.

[1212] Also, the mass spectroscopic data obtained for spots 42α and 43α on a mass spectrometer was analyzed by comparing the data against the NCBI protein data, and as a result, superoxide dismutase [Mn], mitochondrial (amino acid sequence: SEQ ID NO: 525, encoding nucleotide sequence: SEQ ID NO: 524) was identified as a protein comprising any of SEQ ID NOs: 526 to 531 and hypothetical protein GLYMA_04G221300 (amino acid sequence: SEQ ID NO: 533, encoding nucleotide sequence: SEQ ID NO: 532) was identified as a protein comprising any of SEQ ID NOs: 534 to 539.

[1213] Accordingly, the antigen in spot 42α, 43α in the present invention can be any of proteins selected from the group consisting of the proteins as defined below in (42, 43αA1-a) to (42, 43αA1-e), (42, 43αB1), (42, 43αA2-a) to (42, 43αA2-e), and (42, 43αB2): (42, 43αA1-a) a protein comprising an amino acid sequence with deletion, substitution, insertion or addition of one or several amino acids in SEQ ID NO: 525;
[1214] (42, 43αA1-b) a protein comprising an amino acid sequence having at least 70%, preferably at least 75%, at least 80%, at least 85%, at least 90%, at least 95%, at least 97%, at least 98%, or at least 99% identity to the amino acid sequence of SEQ ID NO: 525;
[1215] (42, 43αA1-c) a protein comprising an amino acid sequence encoded by a nucleotide sequence with deletion, substitution, insertion or addition of one or several nucleotides in SEQ ID NO: 524;
[1216] (42, 43αA1-d) a protein comprising an amino acid sequence encoded by a nucleotide sequence having at least 70%, preferably at least 75%, at least 80%, at least 85%, at least 90%, at least 95%, at least 97%, at least 98%, or at least 99% identity to the nucleotide sequence of SEQ ID NO: 524;
[1217] (42, 43αA1-e) a protein comprising an amino acid sequence encoded by a nucleic acid that hybridizes under stringent conditions with a nucleic acid having a nucleotide sequence complementary to the nucleotide sequence of SEQ ID NO: 524;
[1218] (42, 43αB1) a protein comprising at least one amino acid sequence selected from the group consisting of SEQ ID NOs: 526-531, preferably a protein comprising at least 2, 3, 4, or 5 or all sequences of the amino acid sequences. As referred to above, the amino acid sequence of any of SEQ ID NOs: 526 to 531 may be an amino acid sequence derived therefrom by deletion, substitution, insertion or addition of one or several amino acids;
[1219] (42, 43αA2-a) a protein comprising an amino acid sequence with deletion, substitution, insertion or addition of one or several amino acids in SEQ ID NO: 533;
[1220] (42, 43αA2-b) a protein comprising an amino acid sequence having at least 70%, preferably at least 75%, at least 80%, at least 85%, at least 90%, at least 95%, at least 97%, at least 98%, or at least 99% identity to the amino acid sequence of SEQ ID NO: 533;
[1221] (42, 43αA2-c) a protein comprising an amino acid sequence encoded by a nucleotide sequence with deletion, substitution, insertion or addition of one or several nucleotides in SEQ ID NO: 532;
[1222] (42, 43αA2-d) a protein comprising an amino acid sequence encoded by a nucleotide sequence having at least 70%, preferably at least 75%, at least 80%, at least 85%, at least 90%, at least 95%, at least 97%, at least 98%, or at least 99% identity to the nucleotide sequence of SEQ ID NO: 532;
[1223] (42, 43αA2-e) a protein comprising an amino acid sequence encoded by a nucleic acid that hybridizes under stringent conditions with a nucleic acid having a nucleotide sequence complementary to the nucleotide sequence of SEQ ID NO: 532;
[1224] (42, 43αB2) a protein comprising at least one amino acid sequence selected from the group consisting of SEQ ID NOs: 534-539, preferably a protein comprising at least 2, 3, 4, or 5 or all sequences of the amino acid sequences. As referred to above, the amino acid sequence of any of SEQ ID NOs: 534 to 539 may be an amino acid sequence derived therefrom by deletion, substitution, insertion or addition of one or several amino acids.

[1225] The protein selected from the group consisting of the proteins as defined above in (42, 43αA1-a) to (42, 43αA1-e), (42, 43αB1), (42, 43αA2-a) to (42, 43αA2-e), and (42, 43αB2) can be proteins that are found in a protein spot with a molecular weight of around 5 to 60 kDa, preferably around 10 to 50 kDa, and an isoelectric point of 5.5 to 10.5, preferably 6.0 to 10.0 on gels used in the two-dimensional electrophoresis performed under the conditions described above in the subsection titled “Identification of antigens”.

[1226] Epitopes of the aforementioned antigens (42, 43αA1-a) to (42, 43αA1-e) and (42, 43αB1) reside in amino acids 227-241 (SEQ ID NO: 906) of SEQ ID NO: 525. When the antigen in spot 42α, 43α contains a variation in the amino acid sequence of SEQ ID NO: 525, this antigen may retain the sequence in SEQ ID NO: 525 as to amino acids at positions corresponding to the region of at least one of these epitopes.

[1227] From the viewpoint of improving sensitivity (a degree to which a patient can be diagnosed as being positive) or specificity (a degree to which a healthy subject is not diagnosed as being positive), the antigen in spot 42α, 43α may be the following variant.

[1228] In the epitope having the sequence of SEQ ID NO: 906, sites of amino acids other than X in SEQ ID NO: 904 or 905 are important for binding to IgE antibodies from allergic patients. Thus, in another preferred mode, when the antigen in spot 42α, 43α contains a variation in the amino acid sequence of SEQ ID NO: 525, amino acids 227-241 of SEQ ID NO: 525 in this antigen may have the amino acid sequence of SEQ ID NO: 904 or 905.

[1229] Preferably, a protein that is an antigen in spot 42α or 43α has activity equivalent to that of the protein having the amino acid sequence of SEQ ID NO: 525 (superoxide dismutase [Mn], mitochondrial) or the protein having the amino acid sequence of SEQ ID NO: 533 (hypothetical protein GLYMA_04G221300) or causative of an allergy to soybean.

[1230] (45α) Antigen in spot 45α

[1231] As the result of sequence identification of the antigen in spot 45α by mass spectroscopy, the amino acid sequences of SEQ ID NOs: 542-551 were detected.

[1232] Also, the mass spectroscopic data obtained for spot 45α on a mass spectrometer was analyzed by comparing the data against the NCBI protein data, and as a result, uncharacterized protein LOC100499771 (amino acid sequence: SEQ ID NO: 541, encoding nucleotide sequence: SEQ ID NO: 540) was identified as a protein comprising any of SEQ ID NOs: 542 to 545 and hypothetical protein GLYMA_09G192800 (amino acid sequence: SEQ ID NO: 547, encoding nucleotide sequence: SEQ ID NO: 546) was identified as a protein comprising any of SEQ ID NOs: 548 to 551.

[1233] Accordingly, the antigen in spot 45α in the present invention can be any of proteins selected from the group consisting of the proteins as defined below in (45αA1-a) to (45αA1-e), (45αB1), (45αA2-a) to (45αA2e), and (45αB2): (45αA1-a) a protein comprising an amino acid sequence with deletion, substitution, insertion or addition of one or several amino acids in SEQ ID NO: 541;
[1234] (45αA1-b) a protein comprising an amino acid sequence having at least 70%, preferably at least 75%, at least 80%, at least 85%, at least 90%, at least 95%, at least 97%, at least 98%, or at least 99% identity to the amino acid sequence of SEQ ID NO: 541;
[1235] (45αA1-c) a protein comprising an amino acid sequence encoded by a nucleotide sequence with deletion, substitution, insertion or addition of one or several nucleotides in SEQ ID NO: 540;
[1236] (45αA1-d) a protein comprising an amino acid sequence encoded by a nucleotide sequence having at least 70%, preferably at least 75%, at least 80%, at least 85%, at least 90%, at least 95%, at least 97%, at least 98%, or at least 99% identity to the nucleotide sequence of SEQ ID NO: 540;
[1237] (45αA1-e) a protein comprising an amino acid sequence encoded by a nucleic acid that hybridizes under stringent conditions with a nucleic acid having a nucleotide sequence complementary to the nucleotide sequence of SEQ ID NO: 540;
[1238] (45αB1) a protein comprising at least one amino acid sequence selected from the group consisting of SEQ ID NOs: 542-545, preferably a protein comprising at least 2, 3, or all sequences of the amino acid sequences. As referred to above, the amino acid sequence of any of SEQ ID NOs: 542 to 545 may be an amino acid sequence derived therefrom by deletion, substitution, insertion or addition of one or several amino acids;
[1239] (45αA2-a) a protein comprising an amino acid sequence with deletion, substitution, insertion or addition of one or several amino acids in SEQ ID NO: 547;
[1240] (45αA2-b) a protein comprising an amino acid sequence having at least 70%, preferably at least 75%, at least 80%, at least 85%, at least 90%, at least 95%, at least 97%, at least 98%, or at least 99% identity to the amino acid sequence of SEQ ID NO: 547;
[1241] (45αA2-c) a protein comprising an amino acid sequence encoded by a nucleotide sequence with deletion, substitution, insertion or addition of one or several nucleotides in SEQ ID NO: 546;
[1242] (45αA2-d) a protein comprising an amino acid sequence encoded by a nucleotide sequence having at least 70%, preferably at least 75%, at least 80%, at least 85%, at least 90%, at least 95%, at least 97%, at least 98%, or at least 99% identity to the nucleotide sequence of SEQ ID NO: 546;
[1243] (45αA2-e) a protein comprising an amino acid sequence encoded by a nucleic acid that hybridizes under stringent conditions with a nucleic acid having a nucleotide sequence complementary to the nucleotide sequence of SEQ ID NO: 546;

[1244] (45αB2) a protein comprising at least one amino acid sequence selected from the group consisting of SEQ ID NOs: 548-551, preferably a protein comprising at least 2, 3, or all sequences of the amino acid sequences. As referred to above, the amino acid sequence of any of SEQ ID NOs: 548 to 551 may be an amino acid sequence derived therefrom by deletion, substitution, insertion or addition of one or several amino acids.

[1245] The protein selected from the group consisting of the proteins as defined above in (45αA1-a) to (45αA1-e), (45αB131), (45αA2-a) to (45αA2-e), and (45αB2) can be proteins that are found in a protein spot with a molecular weight of around 2 to 50 kDa, preferably around 5 to 40 kDa, and an isoelectric point of 3.5 to 7.5, preferably 4.0 to 7.0 on gels used in the two-dimensional electrophoresis performed under the conditions described above in the subsection titled “Identification of antigens”.

[1246] Epitopes of the aforementioned antigens (45αA1-a) to (45αA1-e) and (45αB 1) reside in amino acids 11-25 (SEQ ID NO: 910), amino acids 51-65 (SEQ ID NO: 911), amino acids 111-125 (SEQ ID NO: 912) of SEQ ID NO: 541. When the antigen in spot 45α contains a variation in the amino acid sequence of SEQ ID NO: 541, amino acids at positions corresponding to the region of at least one of these epitopes may retain the sequence in SEQ ID NO: 541.

[1247] Preferably, a protein that is an antigen in spot 45α has activity equivalent to that of the protein having the amino acid sequence of SEQ ID NO: 541 (uncharacterized protein LOC100499771) or the protein having the amino acid sequence of SEQ ID NO: 547 (hypothetical protein GLYMA_09G192800) or causative of an allergy to soybean.

[1248] (46α) Antigen in Spot 46α

[1249] As the result of sequence identification of the antigen in spot 46α by mass spectroscopy, the amino acid sequence of SEQ ID NOs: 554 was detected.

[1250] Also, the mass spectroscopic data obtained for spot 46α on a mass spectrometer was analyzed by comparing the data against the NCBI protein data, and as a result, seed maturation protein PM22 (amino acid sequence: SEQ ID NO: 553, encoding nucleotide sequence: SEQ ID NO: 552) was identified as a protein comprising SEQ ID NO: 554.

[1251] Accordingly, the antigens in spot 46α in the present invention can be any protein selected from the group consisting of the proteins as defined below in (46αA-a) to (46αA-e) and (46αB):
[1252] (46αA-a) a protein comprising an amino acid sequence with deletion, substitution, insertion or addition of one or several amino acids in SEQ ID NO: 553;
[1253] (46αA-b) a protein comprising an amino acid sequence having at least 70%, preferably at least 75%, at least 80%, at least 85%, at least 90%, at least 95%, at least 97%, at least 98%, or at least 99% identity to the amino acid sequence of SEQ ID NO: 553;
[1254] (46αA-c) a protein comprising an amino acid sequence encoded by a nucleotide sequence with deletion, substitution, insertion or addition of one or several nucleotides in SEQ ID NO: 552;
[1255] (46αA-d) a protein comprising an amino acid sequence encoded by a nucleotide sequence having at least 70%, preferably at least 75%, at least 80%, at least 85%, at least 90%, at least 95%, at least 97%, at least 98%, or at least 99% identity to the nucleotide sequence of SEQ ID NO: 552;
[1256] (46αA-e) a protein comprising an amino acid sequence encoded by a nucleic acid that hybridizes under stringent conditions with a nucleic acid having a nucleotide sequence complementary to the nucleotide sequence of SEQ ID NO: 552;
[1257] (46αB) a protein comprising an amino acid sequence of SEQ ID NO: 554. As referred to above, the amino acid sequence(s) of SEQ ID NO: 554 may be an amino acid sequence(s) derived therefrom by deletion, substitution, insertion or addition of one or several amino acids.

[1258] The proteins selected from the group consisting of (46αA-a) to (46αA-e) and (46αB) as defined above can be proteins that are found in a protein spot with a molecular weight of around 2 to 50 kDa, preferably around 5 to 40 kDa and an isoelectric point of 3.5 to 7.5, preferably 4.0 to 7.0 on gels used in the two-dimensional electrophoresis performed under the conditions described above in the subsection titled “Identification of antigens”.

[1259] An epitope of the antigen in spot 46α resides in amino acids 112-120 (SEQ ID NO: 915) of SEQ ID NO: 553. The antigen in spot 46α may retain the sequence in SEQ ID NO: 553 as to amino acids at positions corresponding to the region of this epitope.

[1260] From the viewpoint of improving sensitivity (a degree to which a patient can be diagnosed as being positive) or specificity (a degree to which a healthy subject is not diagnosed as being positive), the antigen in spot 46α may be the following variant.

[1261] In the epitope having the sequence of SEQ ID NO: 915, sites of amino acids other than X in SEQ ID NO: 913 or 914 are important for binding to IgE antibodies from allergic patients. Thus, in another preferred mode, amino acids 112-120 of SEQ ID NO: 553 in the antigen in spot 46α may have the amino acid sequence of SEQ ID NO: 913 or 914.

[1262] Preferably, a protein that is an antigen in spot 46α has activity equivalent to that of the protein having the amino acid sequence of SEQ ID NO: 553 (seed maturation protein PM22) or causative of an allergy to soybean.

[1263] (47α) Antigen in Spot 47α

[1264] As the result of sequence identification of the antigen in spot 47α by mass spectroscopy, the amino acid sequences of SEQ ID NOs: 557-563 were detected.

[1265] Also, the mass spectroscopic data obtained for spot 47α on a mass spectrometer was analyzed by comparing the data against the NCBI protein data, and as a result, eukaryotic translation initiation factor 5A-2 (amino acid sequence: SEQ ID NO: 556, encoding nucleotide sequence: SEQ ID NO: 555) was identified as a protein comprising SEQ ID NO: 557 or 558 and uncharacterized protein LOC100305510 (amino acid sequence: SEQ ID NO: 560, encoding nucleotide sequence: SEQ ID NO: 559) was identified as a protein comprising any of SEQ ID NOs: 561 to 563.

[1266] Accordingly, the antigen in spot 47α in the present invention can be any of proteins selected from the group consisting of the proteins as defined below in (47αA1-a) to (47αA1-e), (47αB1), (47αA2-a) to (47αA2-e), and (47αB2): (47αA1-a) a protein comprising an amino acid sequence with deletion, substitution, insertion or addition of one or several amino acids in SEQ ID NO: 556;
[1267] (47αA1-b) a protein comprising an amino acid sequence having at least 70%, preferably at least 75%, at least 80%, at least 85%, at least 90%, at least 95%, at least 97%, at least 98%, or at least 99% identity to the amino acid sequence of SEQ ID NO: 556;
[1268] (47αA1-c) a protein comprising an amino acid sequence encoded by a nucleotide sequence with deletion, substitution, insertion or addition of one or several nucleotides in SEQ ID NO: 555;
[1269] (47αA1-d) a protein comprising an amino acid sequence encoded by a nucleotide sequence having at least 70%, preferably at least 75%, at least 80%, at least 85%, at least 90%, at least 95%, at least 97%, at least 98%, or at least 99% identity to the nucleotide sequence of SEQ ID NO: 555;
[1270] (47αA1-e) a protein comprising an amino acid sequence encoded by a nucleic acid that hybridizes under stringent conditions with a nucleic acid having a nucleotide sequence complementary to the nucleotide sequence of SEQ ID NO: 555;
[1271] (47αB1) a protein comprising at least one amino acid sequence selected from the group consisting of SEQ ID NOs: 557 and 558, preferably a protein comprising both the amino acid sequences. As referred to above, the amino acid sequence of any of SEQ ID NOs: 557, 558 may be an amino acid sequence derived therefrom by deletion, substitution, insertion or addition of one or several amino acids;
[1272] (47αA2-a) a protein comprising an amino acid sequence with deletion, substitution, insertion or addition of one or several amino acids in SEQ ID NO: 560;
[1273] (47αA2-b) a protein comprising an amino acid sequence having at least 70%, preferably at least 75%, at least 80%, at least 85%, at least 90%, at least 95%, at least 97%, at least 98%, or at least 99% identity to the amino acid sequence of SEQ ID NO: 560;
[1274] (47αA2-c) a protein comprising an amino acid sequence encoded by a nucleotide sequence with deletion, substitution, insertion or addition of one or several nucleotides in SEQ ID NO: 559;
[1275] (47αA2-d) a protein comprising an amino acid sequence encoded by a nucleotide sequence having at least 70%, preferably at least 75%, at least 80%, at least 85%, at least 90%, at least 95%, at least 97%, at least 98%, or at least 99% identity to the nucleotide sequence of SEQ ID NO: 559;
[1276] (47αA2-e) a protein comprising an amino acid sequence encoded by a nucleic acid that hybridizes under stringent conditions with a nucleic acid having a nucleotide sequence complementary to the nucleotide sequence of SEQ ID NO: 559;
[1277] (47αB2) a protein comprising at least one amino acid sequence selected from the group consisting of SEQ ID NOs: 561-563, preferably a protein comprising at least 2, or all sequences of the amino acid sequences. As referred to above, the amino acid sequence of any of SEQ ID NOs: 548 to 551 may be an amino acid sequence derived therefrom by deletion, substitution, insertion or addition of one or several amino acids.

[1278] The protein selected from the group consisting of the proteins as defined above in (47αA1-a) to (47αA1-e), (47αB1), (47αA2-a) to (47αA2-e), and (47αB2) can be proteins that are found in a protein spot with a molecular weight of around 2 to 50 kDa, preferably around 5 to 40 kDa, and an isoelectric point of 3.5 to 7.5, preferably 4.0 to 7.0 on gels used in the two-dimensional electrophoresis performed under the conditions described above in the subsection titled “Identification of antigens”.

[1279] Epitopes of the aforementioned antigens (47αA1-a) to (47αA1-e) and (47αB1) reside in amino acids 11-25 (SEQ ID NO: 916), amino acids 81-95 (SEQ ID NO: 917), amino acids 131-145 (SEQ ID NO: 918) of SEQ ID NO: 556. When the antigen in spot 47α contains a variation in the amino acid sequence of SEQ ID NO: 556, amino acids at positions corresponding to the region of at least one of these epitopes may retain the sequence in SEQ ID NO: 556.

[1280] Preferably, a protein that is an antigen in spot 47α has activity equivalent to that of the protein having the amino acid sequence of SEQ ID NO: 556 (eukaryotic translation initiation factor 5A-2) or the protein having the amino acid sequence of SEQ ID NO: 560 (uncharacterized protein LOC100305510) or causative of an allergy to soybean.

[1281] (48α) Antigen in Spot 48α

[1282] As the result of sequence identification of the antigen in spot 48α by mass spectroscopy, the amino acid sequences of SEQ ID NOs: 566-570 were detected.

[1283] Also, the mass spectroscopic data obtained for spot 48α on a mass spectrometer was analyzed by comparing the data against the NCBI protein data, and as a result, uncharacterized protein LOC100306570 (amino acid sequence: SEQ ID NO: 565, encoding nucleotide sequence: SEQ ID NO: 564) was identified as a protein comprising any of SEQ ID NOs: 566 to 570.

[1284] Accordingly, the antigens in spot 48α in the present invention can be any protein selected from the group consisting of the proteins as defined below in (48αA-a) to (48αA-e) and (48αB):
[1285] (48αA-a) a protein comprising an amino acid sequence with deletion, substitution, insertion or addition of one or several amino acids in SEQ ID NO: 565;
[1286] (48αA-b) a protein comprising an amino acid sequence having at least 70%, preferably at least 75%, at least 80%, at least 85%, at least 90%, at least 95%, at least 97%, at least 98%, or at least 99% identity to the amino acid sequence of SEQ ID NO: 565;
[1287] (48αA-c) a protein comprising an amino acid sequence encoded by a nucleotide sequence with deletion, substitution, insertion or addition of one or several nucleotides in SEQ ID NO: 564;
[1288] (48αA-d) a protein comprising an amino acid sequence encoded by a nucleotide sequence having at least 70%, preferably at least 75%, at least 80%, at least 85%, at least 90%, at least 95%, at least 97%, at least 98%, or at least 99% identity to the nucleotide sequence of SEQ ID NO: 564;
[1289] (48αA-e) a protein comprising an amino acid sequence encoded by a nucleic acid that hybridizes under stringent conditions with a nucleic acid having a nucleotide sequence complementary to the nucleotide sequence of SEQ ID NO: 564;
[1290] (48αB) a protein comprising at least one amino acid sequence selected from the group consisting of SEQ ID NOs: 566-570, preferably a protein comprising at least 2, 3 or 4 or all sequences of the amino acid sequences. As referred to above, the amino acid sequence of any of SEQ ID NOs: 566-570 may be an amino acid sequence derived therefrom by deletion, substitution, insertion or addition of one or several amino acids.

[1291] The proteins selected from the group consisting of (48αA-a) to (48αA-e) and (48αB) as defined above can be proteins that are found in a protein spot with a molecular weight of around 2 to 50 kDa, preferably around 5 to 40 kDa and an isoelectric point of 3.5 to 8.5, preferably 4.0 to 8.0 on gels used in the two-dimensional electrophoresis performed under the conditions described above in the subsection titled “Identification of antigens”.

[1292] Epitopes of the antigen in spot 48α reside in amino acids 94-102 (SEQ ID NO: 921) and amino acids 131-145 (SEQ ID NO: 922) of SEQ ID NO: 565. The antigen in spot 48a may retain the sequence in SEQ ID NO: 565 as to amino acids at positions corresponding to the region of these epitopes.

[1293] From the viewpoint of improving sensitivity (a degree to which a patient can be diagnosed as being positive) or specificity (a degree to which a healthy subject is not diagnosed as being positive), the antigen in spot 48α may be the following variant.

[1294] In the epitope having the sequence of SEQ ID NO: 921, sites of amino acids other than X in SEQ ID NO: 919 or 918 are important for binding to IgE antibodies from allergic patients. Thus, in another preferred mode, amino acids 94-102 of SEQ ID NO: 565 in the antigen in spot 48α may have the amino acid sequence of SEQ ID NO: 919 or 918.

[1295] Preferably, a protein that is an antigen in spot 48α has activity equivalent to that of the protein having the amino acid sequence of SEQ ID NO: 565 (uncharacterized protein LOC100306570) or causative of an allergy to soybean.

[1296] (50α) Antigen in Spot 50α

[1297] As the result of sequence identification of the antigen in spot 50α by mass spectroscopy, the amino acid sequences of SEQ ID NOs: 573-576 were detected.

[1298] Also, the mass spectroscopic data obtained for spot 50α on a mass spectrometer was analyzed by comparing the data against the NCBI protein data, and as a result, uncharacterized protein LOC 100813859 (amino acid sequence: SEQ ID NO: 572, encoding nucleotide sequence: SEQ ID NO: 571) was identified as a protein comprising any of SEQ ID NOs: 573 to 576.

[1299] Accordingly, the antigens in spot 50α in the present invention can be any protein selected from the group consisting of the proteins as defined below in (50αA-a) to (50αA-e) and (50αB):
[1300] (50αA-a) a protein comprising an amino acid sequence with deletion, substitution, insertion or addition of one or several amino acids in SEQ ID NO: 572;
[1301] (50αA-b) a protein comprising an amino acid sequence having at least 70%, preferably at least 75%, at least 80%, at least 85%, at least 90%, at least 95%, at least 97%, at least 98%, or at least 99% identity to the amino acid sequence of SEQ ID NO: 572;
[1302] (50αA-c) a protein comprising an amino acid sequence encoded by a nucleotide sequence with deletion, substitution, insertion or addition of one or several nucleotides in SEQ ID NO: 571;
[1303] (50αA-d) a protein comprising an amino acid sequence encoded by a nucleotide sequence having at least 70%, preferably at least 75%, at least 80%, at least 85%, at least 90%, at least 95%, at least 97%, at least 98%, or at least 99% identity to the nucleotide sequence of SEQ ID NO: 571;
[1304] (50αA-e) a protein comprising an amino acid sequence encoded by a nucleic acid that hybridizes under stringent conditions with a nucleic acid having a nucleotide sequence complementary to the nucleotide sequence of SEQ ID NO: 571;
[1305] (50αB) a protein comprising at least one amino acid sequence selected from the group consisting of SEQ ID NOs: 573-576, preferably a protein comprising at least 2 or 3 or all sequences of the amino acid sequences. As referred to above, the amino acid sequence of any of SEQ ID NOs: 573-576 may be an amino acid sequence derived therefrom by deletion, substitution, insertion or addition of one or several amino acids.

[1306] The proteins selected from the group consisting of (50αA-a) to (50αA-e) and (50αB) as defined above can be proteins that are found in a protein spot with a molecular weight of around 2 to 50 kDa, preferably around 5 to 40 kDa and an isoelectric point of 2.5 to 6.5, preferably 3.0 to 6.0 on gels used in the two-dimensional electrophoresis performed under the conditions described above in the subsection titled “Identification of antigens”.

[1307] Epitopes of the antigen in spot 50α reside in amino acids 91-105 (SEQ ID NO: 924) and amino acids 62-70 (SEQ ID NO: 927) of SEQ ID NO: 572. The antigen in spot 50a may retain the sequence in SEQ ID NO: 572 as to amino acids at positions corresponding to the region of these epitopes.

[1308] From the viewpoint of improving sensitivity (a degree to which a patient can be diagnosed as being positive) or specificity (a degree to which a healthy subject is not diagnosed as being positive), the antigen in spot 50α may be the following variant.

[1309] In the epitope having the sequence of SEQ ID NO: 927, sites of amino acids other than X in SEQ ID NO: 925 or 926 are important for binding to IgE antibodies from allergic patients. Thus, in another preferred mode, amino acids 62-70 of SEQ ID NO: 572 in the antigen in spot 50α may have the amino acid sequence of SEQ ID NO: 925 or 926.

[1310] Preferably, a protein that is an antigen in spot 50α has activity equivalent to that of the protein having the amino acid sequence of SEQ ID NO: 572 (uncharacterized protein LOC100813859) or causative of an allergy to soybean.

[1311] (51α) Antigen in Spot 51α

[1312] As the result of sequence identification of the antigen in spot 51α by mass spectroscopy, the amino acid sequences of SEQ ID NOs: 579-582 were detected.

[1313] Also, the mass spectroscopic data obtained for spot 51α on a mass spectrometer was analyzed by comparing the data against the NCBI protein data, and as a result, 14-3-3-like protein (amino acid sequence: SEQ ID NO: 578, encoding nucleotide sequence: SEQ ID NO: 577) was identified as a protein comprising any of SEQ ID NOs: 579 to 582.

[1314] Accordingly, the antigens in spot 51α in the present invention can be any protein selected from the group consisting of the proteins as defined below in (51αA-a) to (51αA-e) and (51αB):
[1315] (51αA-a) a protein comprising an amino acid sequence with deletion, substitution, insertion or addition of one or several amino acids in SEQ ID NO: 578;
[1316] (51αA-b) a protein comprising an amino acid sequence having at least 70%, preferably at least 75%, at least 80%, at least 85%, at least 90%, at least 95%, at least 97%, at least 98%, or at least 99% identity to the amino acid sequence of SEQ ID NO: 578;
[1317] (51αA-c) a protein comprising an amino acid sequence encoded by a nucleotide sequence with deletion, substitution, insertion or addition of one or several nucleotides in SEQ ID NO: 577;
[1318] (51αA-d) a protein comprising an amino acid sequence encoded by a nucleotide sequence having at least 70%, preferably at least 75%, at least 80%, at least 85%, at least 90%, at least 95%, at least 97%, at least 98%, or at least 99% identity to the nucleotide sequence of SEQ ID NO: 577;
[1319] (51αA-e) a protein comprising an amino acid sequence encoded by a nucleic acid that hybridizes under stringent conditions with a nucleic acid having a nucleotide sequence complementary to the nucleotide sequence of SEQ ID NO: 577;
[1320] (51αB) a protein comprising at least one amino acid sequence selected from the group consisting of SEQ ID NOs: 579-582, preferably a protein comprising at least 2 or 3 or all sequences of the amino acid sequences. As referred to above, the amino acid sequence of any of SEQ ID NOs: 579-582 may be an amino acid sequence derived therefrom by deletion, substitution, insertion or addition of one or several amino acids.

[1321] The proteins selected from the group consisting of (51αA-a) to (51αA-e) and (51αB) as defined above can be proteins that are found in a protein spot with a molecular weight of around 5 to 60 kDa, preferably around 10 to 50 kDa and an isoelectric point of 2.5 to 6.5, preferably 3.0 to 6.0 on gels used in the two-dimensional electrophoresis performed under the conditions described above in the subsection titled “Identification of antigens”.

[1322] Epitopes of the antigen in spot 51α reside in amino acids 71-85 (SEQ ID NO: 928), amino acids 141-155 (SEQ ID NO: 929) and amino acids 211-225 (SEQ ID NO: 930) of SEQ ID NO: 578. The antigen in spot 51α may retain the sequence in SEQ ID NO: 578 as to amino acids at positions corresponding to the region of these epitopes.

[1323] Preferably, a protein that is an antigen in spot 51α has activity equivalent to that of the protein having the amino acid sequence of SEQ ID NO: 578 (14-3-3-like protein) or causative of an allergy to soybean.

[1324] (52α) Antigen in Spot 52α

[1325] As the result of sequence identification of the antigen in spot 52α by mass spectroscopy, the amino acid sequences of SEQ ID NOs: 585-588 were detected.

[1326] Also, the mass spectroscopic data obtained for spot 52α on a mass spectrometer was analyzed by comparing the data against the NCBI protein data, and as a result, probable fructokinase-4 (amino acid sequence: SEQ ID NO: 584, encoding nucleotide sequence: SEQ ID NO: 583) was identified as a protein comprising any of SEQ ID NOs: 585 to 588.

[1327] Accordingly, the antigens in spot 52α in the present invention can be any protein selected from the group consisting of the proteins as defined below in (52αA-a) to (52αA-e) and (52αB):
[1328] (52αA-a) a protein comprising an amino acid sequence with deletion, substitution, insertion or addition of one or several amino acids in SEQ ID NO: 584;
[1329] (52αA-b) a protein comprising an amino acid sequence having at least 70%, preferably at least 75%, at least 80%, at least 85%, at least 90%, at least 95%, at least 97%, at least 98%, or at least 99% identity to the amino acid sequence of SEQ ID NO: 584;
[1330] (52αA-c) a protein comprising an amino acid sequence encoded by a nucleotide sequence with deletion, substitution, insertion or addition of one or several nucleotides in SEQ ID NO: 583;
[1331] (52αA-d) a protein comprising an amino acid sequence encoded by a nucleotide sequence having at least 70%, preferably at least 75%, at least 80%, at least 85%, at least 90%, at least 95%, at least 97%, at least 98%, or at least 99% identity to the nucleotide sequence of SEQ ID NO: 583;
[1332] (52αA-e) a protein comprising an amino acid sequence encoded by a nucleic acid that hybridizes under stringent conditions with a nucleic acid having a nucleotide sequence complementary to the nucleotide sequence of SEQ ID NO: 583;
[1333] (52αB) a protein comprising at least one amino acid sequence selected from the group consisting of SEQ ID NOs: 585-588, preferably a protein comprising at least 2 or 3 or all sequences of the amino acid sequences. As referred to above, the amino acid sequence of any of SEQ ID NOs: 585-588 may be an amino acid sequence derived therefrom by deletion, substitution, insertion or addition of one or several amino acids.

[1334] The proteins selected from the group consisting of (52αA-a) to (52αA-e) and (52αB) as defined above can be proteins that are found in a protein spot with a molecular weight of around 5 to 60 kDa, preferably around 10 to 50 kDa and an isoelectric point of 3.5 to 7.5, preferably 4.0 to 7.0 on gels used in the two-dimensional electrophoresis performed under the conditions described above in the subsection titled “Identification of antigens”.

[1335] Epitopes of the antigen in spot 52α reside in amino acids 11-25 (SEQ ID NO: 933), amino acids 71-85 (SEQ ID NO: 934), amino acids 121-135 (SEQ ID NO: 935), amino acids 201-215 (SEQ ID NO: 936), amino acids 211-225 (SEQ ID NO: 937), and amino acids 281-295 (SEQ ID NO: 938) of SEQ ID NO: 584. The antigen in spot 52α may retain the sequence in SEQ ID NO: 584 as to amino acids at positions corresponding to the region of these epitopes.

[1336] From the viewpoint of improving sensitivity (a degree to which a patient can be diagnosed as being positive) or specificity (a degree to which a healthy subject is not diagnosed as being positive), the antigen in spot 52α may be the following variant.

[1337] In the epitope having the sequence of SEQ ID NO: 933, sites of amino acids other than X in SEQ ID NO: 931 or 932 are important for binding to IgE antibodies from allergic patients. Thus, in another preferred mode, amino acids 11-25 of SEQ ID NO: 584 in the antigen in spot 52α may have the amino acid sequence of SEQ ID NO: 931 or 932.

[1338] Preferably, a protein that is an antigen in spot 52α has activity equivalent to that of the protein having the amino acid sequence of SEQ ID NO: 584 (probable fructokinase-4) or causative of an allergy to soybean.

[1339] (53α) Antigen in Spot 53α

[1340] As the result of sequence identification of the antigen in spot 53α by mass spectroscopy, the amino acid sequences of SEQ ID NOs: 591-604 were detected.

[1341] Also, the mass spectroscopic data obtained for spot 53α on a mass spectrometer was analyzed by comparing the data against the NCBI protein data, and as a result, triosephosphate isomerase isoform X1 (amino acid sequence: SEQ ID NO: 590, encoding nucleotide sequence: SEQ ID NO: 589) was identified as a protein comprising any of SEQ ID NOs: 591 to 597 and triosephosphate isomerase, cytosolic (amino acid sequence: SEQ ID NO: 599, encoding nucleotide sequence: SEQ ID NO: 598) was identified as a protein comprising any of SEQ ID NOs: 600 to 604.

[1342] Accordingly, the antigen in spot 53α in the present invention can be any of proteins selected from the group consisting of the proteins as defined below in (53αA1-a) to (53αA1-e), (53αB1), (53αA2-a) to (53αA2-e), and (53αB2): (53αA1-a) a protein comprising an amino acid sequence with deletion, substitution, insertion or addition of one or several amino acids in SEQ ID NO: 590;
[1343] (53αA1-b) a protein comprising an amino acid sequence having at least 70%, preferably at least 75%, at least 80%, at least 85%, at least 90%, at least 95%, at least 97%, at least 98%, or at least 99% identity to the amino acid sequence of SEQ ID NO: 590;
[1344] (53αA1-c) a protein comprising an amino acid sequence encoded by a nucleotide sequence with deletion, substitution, insertion or addition of one or several nucleotides in SEQ ID NO: 589;
[1345] (53αA1-d) a protein comprising an amino acid sequence encoded by a nucleotide sequence having at least 70%, preferably at least 75%, at least 80%, at least 85%, at least 90%, at least 95%, at least 97%, at least 98%, or at least 99% identity to the nucleotide sequence of SEQ ID NO: 589;
[1346] (53αA1-e) a protein comprising an amino acid sequence encoded by a nucleic acid that hybridizes under stringent conditions with a nucleic acid having a nucleotide sequence complementary to the nucleotide sequence of SEQ ID NO: 589;
[1347] (53αB1) a protein comprising at least one amino acid sequence selected from the group consisting of SEQ ID NOs: 591-597, preferably a protein comprising at least 2, 3, 4, 5, or 6 or all sequences of the amino acid sequences. As referred to above, the amino acid sequence of any of SEQ ID NOs: 591 to 597 may be an amino acid sequence derived therefrom by deletion, substitution, insertion or addition of one or several amino acids;
[1348] (53αA2-a) a protein comprising an amino acid sequence with deletion, substitution, insertion or addition of one or several amino acids in SEQ ID NO: 599;
[1349] (53αA2-b) a protein comprising an amino acid sequence having at least 70%, preferably at least 75%, at least 80%, at least 85%, at least 90%, at least 95%, at least 97%, at least 98%, or at least 99% identity to the amino acid sequence of SEQ ID NO: 599;
[1350] (53αA2-c) a protein comprising an amino acid sequence encoded by a nucleotide sequence with deletion, substitution, insertion or addition of one or several nucleotides in SEQ ID NO: 598;
[1351] (53αA2-d) a protein comprising an amino acid sequence encoded by a nucleotide sequence having at least 70%, preferably at least 75%, at least 80%, at least 85%, at least 90%, at least 95%, at least 97%, at least 98%, or at least 99% identity to the nucleotide sequence of SEQ ID NO: 598;
[1352] (53αA2-e) a protein comprising an amino acid sequence encoded by a nucleic acid that hybridizes under stringent conditions with a nucleic acid having a nucleotide sequence complementary to the nucleotide sequence of SEQ ID NO: 598;
[1353] (53αB2) a protein comprising at least one amino acid sequence selected from the group consisting of SEQ ID NOs: 600-604, preferably a protein comprising at least 2, 3, or 4 or all sequences of the amino acid sequences. As referred to above, the amino acid sequence of any of SEQ ID NOs: 600 to 604 may be an amino acid sequence derived therefrom by deletion, substitution, insertion or addition of one or several amino acids.

[1354] The protein selected from the group consisting of the proteins as defined above in (53αA1-a) to (53αA1-e), (53αB1), (53αA2-a) to (53αA2-e), and (53αB2) can be proteins that are found in a protein spot with a molecular weight of around 5 to 60 kDa, preferably around 10 to 50 kDa, and an isoelectric point of 3.5 to 8.5, preferably 4.0 to 8.0 on gels used in the two-dimensional electrophoresis performed under the conditions described above in the subsection titled “Identification of antigens”.

[1355] Epitopes of the aforementioned antigens (53αA1-a) to (53αA1-e) and (53αB1) reside in amino acids 71-85 (SEQ ID NO: 939) of SEQ ID NO: 590. When the antigen in spot 53α contains a variation in the amino acid sequence of SEQ ID NO: 590, amino acids at positions corresponding to the region of at least one of these epitopes may retain the sequence in SEQ ID NO: 590.

[1356] Preferably, a protein that is an antigen in spot 53cc has activity equivalent to that of the protein having the amino acid sequence of SEQ ID NO: 590 (triosephosphate isomerase isoform X1) or the protein having the amino acid sequence of SEQ ID NO: 599 (triosephosphate isomerase, cytosolic) or causative of an allergy to soybean.

[1357] (54α) Antigen in Spot 54α

[1358] As the result of sequence identification of the antigen in spot 54α by mass spectroscopy, the amino acid sequences of SEQ ID NOs: 607-616 were detected.

[1359] Also, the mass spectroscopic data obtained for spot 54α on a mass spectrometer was analyzed by comparing the data against the NCBI protein data, and as a result, superoxide dismutase [Fe], chloroplastic isoform X1 (amino acid sequence: SEQ ID NO: 606, encoding nucleotide sequence: SEQ ID NO: 605) as a protein comprising any of SEQ ID NOs: 607 to 611 and iron-superoxide dismutase (amino acid sequence: SEQ ID NO: 613, encoding nucleotide sequence: SEQ ID NO: 612) was identified as a protein comprising any of SEQ ID NOs: 614 to 616.

[1360] Accordingly, the antigen in spot 54α in the present invention can be any of proteins selected from the group consisting of the proteins as defined below in (54αA1-a) to (54αA1-e), (54αB1), (54αA2-a) to (54αA2-e), and (54αB2): (54αA1-a) a protein comprising an amino acid sequence with deletion, substitution, insertion or addition of one or several amino acids in SEQ ID NO: 606;
[1361] (54αA1-b) a protein comprising an amino acid sequence having at least 70%, preferably at least 75%, at least 80%, at least 85%, at least 90%, at least 95%, at least 97%, at least 98%, or at least 99% identity to the amino acid sequence of SEQ ID NO: 606;
[1362] (54αA1-c) a protein comprising an amino acid sequence encoded by a nucleotide sequence with deletion, substitution, insertion or addition of one or several nucleotides in SEQ ID NO: 605;
[1363] (54αA1-d) a protein comprising an amino acid sequence encoded by a nucleotide sequence having at least 70%, preferably at least 75%, at least 80%, at least 85%, at least 90%, at least 95%, at least 97%, at least 98%, or at least 99% identity to the nucleotide sequence of SEQ ID NO: 605;
[1364] (54αA1-e) a protein comprising an amino acid sequence encoded by a nucleic acid that hybridizes under stringent conditions with a nucleic acid having a nucleotide sequence complementary to the nucleotide sequence of SEQ ID NO: 605;
[1365] (54αB1) a protein comprising at least one amino acid sequence selected from the group consisting of SEQ ID NOs: 607-611, preferably a protein comprising at least 2, 3, or 4 or all sequences of the amino acid sequences. As referred to above, the amino acid sequence of any of SEQ ID NOs: 591 to 597 may be an amino acid sequence derived therefrom by deletion, substitution, insertion or addition of one or several amino acids;
[1366] (54αA2-a) a protein comprising an amino acid sequence with deletion, substitution, insertion or addition of one or several amino acids in SEQ ID NO: 613;
[1367] (54αA2-b) a protein comprising an amino acid sequence having at least 70%, preferably at least 75%, at least 80%, at least 85%, at least 90%, at least 95%, at least 97%, at least 98%, or at least 99% identity to the amino acid sequence of SEQ ID NO: 613;
[1368] (54αA2-c) a protein comprising an amino acid sequence encoded by a nucleotide sequence with deletion, substitution, insertion or addition of one or several nucleotides in SEQ ID NO: 612;
[1369] (54αA2-d) a protein comprising an amino acid sequence encoded by a nucleotide sequence having at least 70%, preferably at least 75%, at least 80%, at least 85%, at least 90%, at least 95%, at least 97%, at least 98%, or at least 99% identity to the nucleotide sequence of SEQ ID NO: 612;
[1370] (54αA2-e) a protein comprising an amino acid sequence encoded by a nucleic acid that hybridizes under stringent conditions with a nucleic acid having a nucleotide sequence complementary to the nucleotide sequence of SEQ ID NO: 612;
[1371] (54αB2) a protein comprising at least one amino acid sequence selected from the group consisting of SEQ ID NOs: 614-616, preferably a protein comprising at least 2, or all sequences of the amino acid sequences. As referred to above, the amino acid sequence of any of SEQ ID NOs: 614 to 616 may be an amino acid sequence derived therefrom by deletion, substitution, insertion or addition of one or several amino acids.

[1372] The protein selected from the group consisting of the proteins as defined above in (54αA1-a) to (54αA1-e), (54αB1), (54αA2-a) to (54αA2-e), and (54αB2) can be proteins that are found in a protein spot with a molecular weight of around 5 to 60 kDa, preferably around 10 to 50 kDa, and an isoelectric point of 3.5 to 8.5, preferably 4.0 to 8.0 on gels used in the two-dimensional electrophoresis performed under the conditions described above in the subsection titled “Identification of antigens”.

[1373] Epitopes of the aforementioned antigens (54αA1-a) to (54αA1-e) and (54αB1) reside in amino acids 121-135 (SEQ ID NO: 940), amino acids 148-154 (SEQ ID NO: 943) of SEQ ID NO: 606. When the antigen in spot 54α contains a variation in the amino acid sequence of SEQ ID NO: 606, amino acids at positions corresponding to the region of at least one of these epitopes may retain the sequence in SEQ ID NO: 606.

[1374] From the viewpoint of improving sensitivity (a degree to which a patient can be diagnosed as being positive) or specificity (a degree to which a healthy subject is not diagnosed as being positive), the antigen in spot 54α may be the following variant.

[1375] In the epitope having the sequence of SEQ ID NO: 943, sites of amino acids other than X in SEQ ID NO: 941 or 942 are important for binding to IgE antibodies from allergic patients. Thus, in another preferred mode, when the antigen in spot 54α contains a variation in the amino acid sequence of SEQ ID NO: 606, amino acids 148-154 of SEQ ID NO: 606 in this antigen may have the amino acid sequence of SEQ ID NO: 941 or 942.

[1376] Preferably, a protein that is an antigen in spot 54α has activity equivalent to that of the protein having the amino acid sequence of SEQ ID NO: 606 (superoxide dismutase [Fe], chloroplastic isoform X1) or the protein having the amino acid sequence of SEQ ID NO: 613 (iron-superoxide dismutase) or causative of an allergy to soybean.

[1377] (55α) Antigen in Spot 55α

[1378] As the result of sequence identification of the antigen in spot 55α by mass spectroscopy, the amino acid sequences of SEQ ID NOs: 619-649 were detected.

[1379] Also, the mass spectroscopic data obtained for spot 55α on a mass spectrometer was analyzed by comparing the data against the NCBI protein data, and as a result, 51 kDa seed maturation protein precursor (amino acid sequence: SEQ ID NO: 618, encoding nucleotide sequence: SEQ ID NO: 617) was identified as a protein comprising any of SEQ ID NOs: 619 to 635 and Lea protein precursor (amino acid sequence: SEQ ID NO: 637, encoding nucleotide sequence: SEQ ID NO: 636) was identified as a protein comprising any of SEQ ID NOs: 638 to 649.

[1380] Accordingly, the antigen in spot 55α in the present invention can be any of proteins selected from the group consisting of the proteins as defined below in (55αA1-a) to (55αA1-e), (55αB1), (55αA2-a) to (55αA2-e), and (55αB2): (55αA1-a) a protein comprising an amino acid sequence with deletion, substitution, insertion or addition of one or several amino acids in SEQ ID NO: 618;
[1381] (55αA1-b) a protein comprising an amino acid sequence having at least 70%, preferably at least 75%, at least 80%, at least 85%, at least 90%, at least 95%, at least 97%, at least 98%, or at least 99% identity to the amino acid sequence of SEQ ID NO: 618;
[1382] (55αA1-c) a protein comprising an amino acid sequence encoded by a nucleotide sequence with deletion, substitution, insertion or addition of one or several nucleotides in SEQ ID NO: 617;
[1383] (55αA1-d) a protein comprising an amino acid sequence encoded by a nucleotide sequence having at least 70%, preferably at least 75%, at least 80%, at least 85%, at least 90%, at least 95%, at least 97%, at least 98%, or at least 99% identity to the nucleotide sequence of SEQ ID NO: 617;
[1384] (55αA1-e) a protein comprising an amino acid sequence encoded by a nucleic acid that hybridizes under stringent conditions with a nucleic acid having a nucleotide sequence complementary to the nucleotide sequence of SEQ ID NO: 617;
[1385] (55αB1) a protein comprising at least one amino acid sequence selected from the group consisting of SEQ ID NOs: 619-635, preferably a protein comprising at least 2, 3, 4, 5, 6, 7, 8, 9, 10, 11, 12, 13, 14, 15, or 16 or all sequences of the amino acid sequences. As referred to above, the amino acid sequence of any of SEQ ID NOs: 619 to 635 may be an amino acid sequence derived therefrom by deletion, substitution, insertion or addition of one or several amino acids;
[1386] (55αA2-a) a protein comprising an amino acid sequence with deletion, substitution, insertion or addition of one or several amino acids in SEQ ID NO: 637;
[1387] (55αA2-b) a protein comprising an amino acid sequence having at least 70%, preferably at least 75%, at least 80%, at least 85%, at least 90%, at least 95%, at least 97%, at least 98%, or at least 99% identity to the amino acid sequence of SEQ ID NO: 637;
[1388] (55αA2-c) a protein comprising an amino acid sequence encoded by a nucleotide sequence with deletion, substitution, insertion or addition of one or several nucleotides in SEQ ID NO: 636;
[1389] (55αA2-d) a protein comprising an amino acid sequence encoded by a nucleotide sequence having at least 70%, preferably at least 75%, at least 80%, at least 85%, at least 90%, at least 95%, at least 97%, at least 98%, or at least 99% identity to the nucleotide sequence of SEQ ID NO: 636;
[1390] (55αA2-e) a protein comprising an amino acid sequence encoded by a nucleic acid that hybridizes under stringent conditions with a nucleic acid having a nucleotide sequence complementary to the nucleotide sequence of SEQ ID NO: 636;
[1391] (55αB2) a protein comprising at least one amino acid sequence selected from the group consisting of SEQ ID NOs: 638-649, preferably a protein comprising at least 2, 3, 4, 5, 6, 7, 8, 9, 10, or 11 or all sequences of the amino acid sequences. As referred to above, the amino acid sequence of any of SEQ ID NOs: 638 to 649 may be an amino acid sequence derived therefrom by deletion, substitution, insertion or addition of one or several amino acids.

[1392] The protein selected from the group consisting of the proteins as defined above in (55αA1-a) to (55αA1-e), (55αB1), (55αA2-a) to (55αA2-e), and (55αB2) can be proteins that are found in a protein spot with a molecular weight of around 30 to 90 kDa, preferably around 40 to 80 kDa, and an isoelectric point of 5.5 to 10.5, preferably 6.0 to 10.0 on gels used in the two-dimensional electrophoresis performed under the conditions described above in the subsection titled “Identification of antigens”.

[1393] Epitopes of the aforementioned antigens (55αA1-a) to (55αA1-e) and (55αB1) reside in amino acids 201-209 (SEQ ID NO: 946), amino acids 318-325 (SEQ ID NO: 949), amino acids 202-210 (SEQ ID NO: 952) of SEQ ID NO: 618. When the antigen in spot 55α contains a variation in the amino acid sequence of SEQ ID NO: 618, amino acids at positions corresponding to the region of at least one of these epitopes may retain the sequence in SEQ ID NO: 618.

[1394] From the viewpoint of improving sensitivity (a degree to which a patient can be diagnosed as being positive) or specificity (a degree to which a healthy subject is not diagnosed as being positive), the antigen in spot 55α may be the following variant.

[1395] In the epitope having the sequence of SEQ ID NO: 946, sites of amino acids other than X in SEQ ID NO: 944 or 945 are important for binding to IgE antibodies from allergic patients. Thus, in another preferred mode, when the antigen in spot 55α contains a variation in the amino acid sequence of SEQ ID NO: 618, amino acids 201-209 of SEQ ID NO: 618 in this antigen may have the amino acid sequence of SEQ ID NO: 944 or 945.

[1396] In the epitope having the sequence of SEQ ID NO: 949, sites of amino acids other than X in SEQ ID NO: 947 or 948 are important for binding to IgE antibodies from allergic patients. Thus, in another preferred mode, when the antigen in spot 55α contains a variation in the amino acid sequence of SEQ ID NO: 618, amino acids 318-325 of SEQ ID NO: 618 in this antigen may have the amino acid sequence of SEQ ID NO: 947 or 948.

[1397] In the epitope having the sequence of SEQ ID NO: 952, sites of amino acids other than X in SEQ ID NO: 950 or 951 are important for binding to IgE antibodies from allergic patients. Thus, in another preferred mode, when the antigen in spot 55α contains a variation in the amino acid sequence of SEQ ID NO: 618, amino acids 202-210 of SEQ ID NO: 618 in this antigen may have the amino acid sequence of SEQ ID NO: 950 or 951.

[1398] Preferably, a protein that is an antigen in spot 55α has activity equivalent to that of the protein having the amino acid sequence of SEQ ID NO: 618 (51 kDa seed maturation protein precursor) or the protein having the amino acid sequence of SEQ ID NO: 637 (Lea protein precursor) or causative of an allergy to soybean.

[1399] The proteins that are the aforementioned antigens (1α) to (55α) include those proteins whose amino acid residues are modified by phosphorylation, sugar chain modification, aminoacylation, ring-opening, deamination or the like.

[1400] By stating herein “deletion, substitution, insertion or addition of one or several amino acids” in relation to amino acid sequence, it is meant that in an amino acid sequence of interest, one or several amino acids (e.g., 30%, preferably 25%, 20%, 15%, 10%, 5%, 3%, 2% or 1%, of amino acids with respect to the total length of the amino acid sequence, or e.g., 1, 2, 3, 4, 5, 6, 7, 8, 9 or 10 amino acids) are deleted, one or several amino acids are substituted by any other amino acids, any other amino acids are inserted, and/or any other amino acids are added.

[1401] Among the aforementioned modifications, substitution is preferably conservative substitution. The “conservative substitution” refers to the substitution of a certain amino acid residue by a different amino acid residue having similar physicochemical characteristics, and can be any type of substitution as long as it does not substantially change the characteristics of the structure of the original sequence for example, any type of substitution is acceptable as long as any substituted amino acids do not disrupt the helical structure of the original sequence or other secondary structures that characterize the original sequence. The following gives examples of separate groups of amino acid residues that are conservatively substitutable with each other, but substitutable amino acid residues are not limited to the examples given below.
[1402] Group A: leucine, isoleucine, valine, alanine, methionine
[1403] Group B: aspartic acid, glutamic acid
[1404] Group C: asparagine, glutamine
[1405] Group D: lysine, arginine
[1406] Group E: serine, threonine
[1407] Group F: phenylalanine, tyrosine

[1408] In the case of non-conservative substitution, one member belonging to one of the aforementioned groups can be replaced with a member belong to any other group. For example, in order to eliminate the possibility of unwanted sugar-chain modification, amino acids of group B, D or E as listed above may be substituted by those of any other group. Also, cysteines may be deleted or substituted by any other amino acids to prevent them from being folded into a protein in its tertiary structure. Also, in order to maintain the balance between hydrophilicity and hydrophobicity or to increase hydrophilicity for the purpose of facilitating synthesis, any amino acids may be substituted in consideration of the hydropathy scales of amino acids, which are a measure of the hydrophilic and hydrophobic properties of amino acids (J. Kyte and R. Doolittle, J. Mol. Biol., Vol.157, p.105-132, 1982).

[1409] As referred to herein, the percent identity between two amino acid sequences can be determined by visual inspection and mathematical calculation. Alternatively, the percent identity can be determined using a computer program. Examples of such computer programs include BLAST, FASTA (Altschul, et al., J. Mol. Biol., 215: 403-410 (1990)), and ClustalW. In particular, various conditions (parameters) for identity searches with the BLAST program are described in Altschul, et al. (Nucl. Acids. Res., 25, p. 3389-3402, 1997), and are publicly available on the websites of the National Center for Biotechnology Information (NCBI) and DNA Data Bank of Japan (DDBJ) (Altschul, et al., BLAST Manual, Altschul, et al., NCB/NLM/NIH Bethesda, Md. 20894). Also, the percent identity can be determined using a genetic information processing software program, such as GENETYX Ver.7 (Genetyx Corporation), DNASIS Pro (Hitachi Software Engineering Co., Ltd.), or Vector NTI (Infomax Inc.).

[1410] By stating herein “deletion, substitution, insertion or addition of one or several nucleotides” in relation to nucleotide sequence, it is meant that in a nucleotide sequence of interest, one or several nucleotides (e.g., 30%, preferably 25%, 20%, 15%, 10%, 5%, 3%, 2% or 1%, of nucleotides with respect to the total length of the nucleotide sequence, or e.g., 1, 5, 10, 15, 20, 25 or 30 nucleotides) are deleted, one or several nucleotides are substituted by any other nucleotides, any other nucleotides are inserted, and/or any other nucleotides are added. It is preferable that such a nucleotide deletion, substitution, insertion or addition should not give rise to a frame shift in an amino acid coding sequence.

[1411] As referred to herein, the percent identity between two nucleotide sequences can be determined by visual inspection and mathematical calculation. Alternatively, the percent identity can be determined using a computer program. Examples of such sequence comparison computer programs include the BLASTN program, version 2.2.7, available on the website of the National Library of Medicine (http://www.ncbi.nlm.nih.gov/blast/b12seq/bls.html) (Altschul, et al. (1990) J. Mol. Biol., 215: 403-10), or the WU-BLAST 2.0 algorithm. Standard default parameter settings for WU-BLAST 2.0 are found and available on the following website: http://blast.wustl.edu.

[1412] As referred to herein, “under stringent conditions” means that hybridization takes place under moderately or highly stringent conditions. To be specific, the moderately stringent conditions can be easily determined by those having ordinary skill in the art on the basis of, for example, the length of DNA. Basic conditions are described in Sambrook, et al., Molecular Cloning: A Laboratory Manual, 3rd ed., ch.6-7, Cold Spring Harbor Laboratory Press, 2001. The moderately stringent conditions include hybridization under the conditions of preferably 1×SSC to 6×SSC at 42° C. to 55° C., more preferably 1×SSC to 3×SSC at 45° C. to 50° C., most preferably 2×SSC at 50° C. In the case of using a hybridization solution containing, for example, about 50% formamide, a temperature around 5 to 15° C. lower than the foregoing should be adopted. Washing is also carried out under the conditions of 0.5×SSC to 6×SSC at 40° C. to 60° C. In the process of hybridization and washing, generally 0.05% to 0.2% SDS, preferably about 0.1% SDS, may be added. Likewise, the highly stringent conditions can be easily determined by those having ordinary skill in the art on the basis of, for example, the length of DNA. Generally, the highly stringent (high stringent) conditions include hybridization and/or washing at a higher temperature and/or a lower salt concentration than those adopted under the moderately stringent conditions. For example, hybridization is carried out under the conditions of 0.1×SSC to 2×SSC at 55° C. to 65° C., more preferably 0.1×SSC to 1×SSC at 60° C. to 65° C., most preferably 0.2×SSC at 63° C. Washing is carried out under the conditions of 0.2×SSC to 2×SSC at 50° C. to 68° C., more preferably 0.2×SSC at 60 to 65° C.

[1413] The residue of X as to the epitopes of the aforementioned antigens (1α) to (55α) is an amino acid residue at a site where binding activity against IgE antibodies from allergic patients was maintained even after substitution by alanine in alanine scanning described in Example 4. It is well known to those skilled in the art that even when such a site is substituted by any other amino acids, it is highly probable that this binding activity against IgE antibodies is maintained.

[1414] Antigens may be obtained by separating and purifying them from soybean using a combination of protein purification methods well known to those skilled in the art. Also, antigens may be obtained by expressing them as recombinant proteins using a genetic recombination technique well known to those skilled in the art and by separating and purifying them using protein purification methods well known to those skilled in the art.

[1415] Exemplary protein purification methods include: solubility-based purification methods such as salt precipitation and solvent precipitation; purification methods based on molecular weight difference, such as dialysis, ultrafiltration, gel filtration and SDS-PAGE; charge-based purification methods such as ion exchange chromatography and hydroxylapatite chromatography; specific affinity-based purification methods such as affinity chromatography; purification methods based on hydrophobicity difference, such as reverse-phase high-performance liquid chromatography; and purification methods based on isoelectric point difference, such as isoelectric focusing.

[1416] Preparation of a protein by a genetic recombination technique is carried out by preparing an expression vector comprising an antigen-encoding nucleic acid, introducing the expression vector into appropriate host cells by gene transfer or genetic transformation, culturing the host cells under suitable conditions for expression of a recombinant protein, and recovering the recombinant protein expressed in the host cells.

[1417] The “vector” refers to a nucleic acid that can be used to introduce a nucleic acid attached thereto into host cells. The “expression vector” is a vector that can induce the expression of a protein encoded by a nucleic acid introduced therethrough. Exemplary vectors include plasmid vectors and viral vectors. Those skilled in the art can select an appropriate expression vector for the expression of a recombinant protein depending on the type of host cells to be used.

[1418] The “host cells” refers to cells that undergo gene transfer or genetic transformation by a vector. The host cells can be appropriately selected by those skilled in the art depending on the type of the vector to be used. The host cells can be derived from prokaryotes such as E. coli. When prokaryotic cells like E coli. are used as host cells, the antigen of the present invention may be designed to contain an N-terminal methionine residue in order to facilitate the expression of a recombinant protein in the prokaryotic cells. The N-terminal methionine can be cleaved from the recombinant protein after expression. Also, the host cells may be cells derived from eukaryotes, such as single-cell eukaryotes like yeast, plant cells and animal cells (e.g., human cells, monkey cells, hamster cells, rat cells, murine cells or insect cells) or silkworm.

[1419] Gene transfer or genetic transformation of an expression vector into host cells can be carried out as appropriate by following a technique known to those skilled in the art. Those skilled in the art can make possible the expression of a recombinant protein by selecting suitable conditions for the expression of the recombinant protein as appropriate depending on the type of host cells and culturing the host cells under the selected conditions. Then, those skilled in the art can homogenize the host cells having the expressed recombinant protein, and separate and purify an antigen expressed as the recombinant protein from the resulting homogenate by using an appropriate combination of such protein purification methods as mentioned above.

[1420] Diagnosis Kit and Method (1)

[1421] The present invention provides a method for providing an indicator for diagnosing an allergy to a soybean in a subject, the method comprising the steps of:
[1422] (i) contacting a sample obtained from the subject with an antigen, wherein the sample is a solution comprising an Ig antibody;
[1423] (ii) detecting binding between an IgE antibody present in the sample from the subject and the antigen; and
[1424] (iii) when the binding between the IgE antibody in the subject and the antigen is detected, an indicator of the fact that the subject is allergic to a soybean is provided;
   wherein the antigen is at least one of proteins as defined above in any of (1α) to (55α).

[1425] The sample obtained from a subject is a solution containing an Ig antibody, preferably an IgE antibody, as collected from the subject. Examples of such solutions include blood, saliva, sputum, snivel, urine, sweat, and tear. The sample obtained from the subject may be subjected to pretreatment for increasing the concentration of an Ig antibody in the sample before being contacted with an antigen. The pretreatment of a sample may involve, for example, collection of the serum or the plasma from the blood. Furthermore, a Fab moiety that is an antigen-binding moiety may be purified. In a particularly preferred mode, the step (i) mentioned above is carried out by contacting an IgE antibody present in the serum obtained from a subject with an antigen.

[1426] The IgE antibody may be the IgE antibody itself or may be mast cells or the like bound to IgE antibodies.

[1427] Detection of contact and binding between the sample obtained from a subject and an antigen can be carried out by using a known method. Examples of such methods that can be used include detection by ELISA (Enzyme-Linked Immunosorbent Assay), sandwich immunoassay, immunoblotting, immunoprecipitation, or immunochromatography. These are all techniques for detecting binding between an antigen and an IgE antibody from a subject by contacting and binding the IgE antibody from a subject with the antigen, allowing an enzymatically labelled secondary antibody to act on the IgE antibody specifically bound to the antigen, and adding an enzyme substrate (generally, chromogenic or luminescent reagent) to detect an enzymatic reaction product. Also, a method for detecting a fluorescently labeled secondary antibody can be used. Alternatively, detection by a measurement method capable of evaluating binding between an antigen and an IgE antibody, such as surface plasmon resonance (SPR), can also be used. A plurality of antigen-specific IgE antibodies may be mixed.

[1428] The antigen may be provided as an isolated antigen in a state immobilized on a carrier. In this case, the steps (i) and (ii) mentioned above can be carried out using ELISA, sandwich immunoassay, immunochromatography, surface plasmon resonance, or the like. Also, the step (i) mentioned above can be carried out by contacting the sample obtained from a subject with an antigen-immobilized surface. The isolated antigen may be obtained by separating and purifying it from soybean using a combination of protein purification methods well known to those skilled in the art, or by preparing it using a genetic recombination technique. The IgE antibody from the subject may be used in a state immobilized on a carrier, and binding to the antigen may be detected by the aforementioned technique.

[1429] The antigen may be in a state unimmobilized on a carrier. In this case, flow cytometry or the like can be used in the aforementioned steps (i) and (ii), and the presence of the antigen bound to the antibody can be confirmed with laser beam. Examples include a basophil activation test (BAT). Another example includes a histamine release test (HRT) which examines whether histamine is released by further contacting an antigen with blood cells in a sample.

[1430] The antigen may be detected by immunoblotting in a state separated by two-dimensional electrophoresis. The two-dimensional electrophoresis is a technique for separating a protein sample by performing isoelectric focusing in the first dimension and performing SDS-PAGE (SDS-polyacrylamide gel electrophoresis) in the second dimension. The conditions for two-dimensional electrophoresis are not particularly limited as long as the conditions permit the separation of the antigen of the present invention. For example, the conditions for two-dimensional electrophoresis as described above in the subsection titled “Identification of antigens” can be adopted. Also, the electrophoresis conditions may be defined by reference to the descriptions in Patent Literatures 1 to 4 mentioned above. For example, two-dimensional electrophoresis can be carried out under the conditions that satisfy at least one selected from the group consisting of the following requirements:
[1431] (A) the isoelectric focusing gels used in the first dimension should have a gel-strip length of 5 to 10 cm and a gel pH range of 3 to 10, and the pH gradient of the gels in the direction of electrophoresis should be as follows: where the gel-strip length up to pH 5 is taken as “a”, that length from pH 5 to 7 as “b”, and that length above pH 7 as “c”, the relations “a<b” and “b>c” are satisfied;
[1432] (B) in the case of (A), when the total gel-strip length is taken as 1, “a” should be in the range of 0.15 to 0.3, “b” should be in the range of 0.4 to 0.7, and “c” should be in the range of 0.15 to 0.3;
[1433] (C) in the first dimensional isoelectric focusing, a constant voltage step should be performed by applying a constant voltage ranging from 100 V to 600 V per gel strip containing a sample, and after the electrophoresis variation width during electrophoresis for 30 minutes falls within the range of 5 μA, a voltage-increasing step should be started at which the voltage is increased from the aforementioned constant voltage;
[1434] (D) in the case of (C), the final voltage at the voltage-increasing step should be in the range of 3000 V to 6000 V;
[1435] (E) the isoelectric focusing gels used in the first dimension should have a longitudinal gel-strip length of 5 to 10 cm, and the electrophoresis gels used in the second dimension should have a gel concentration at the distal end in the direction of electrophoresis, which is in the range of 3 to 6%; and
[1436] (F) in the case of (E), the electrophoresis gels used in the second dimension should have a gel concentration at the proximal end in the direction of electrophoresis, which is set to a higher value than that at the distal end in the direction of electrophoresis.

[1437] The aforementioned antigens (1 α) to (55α) are antigens that specifically bind to IgE antibodies from patients with allergy to soybean. Therefore, when binding between an IgE antibody from a subject and the antigen is detected, an indicator of the fact that the subject is allergic to soybean is provided.

[1438] The present invention further provides a kit for diagnosing an allergy to a soybean, comprising at least one of the aforementioned antigens (1α) to (55α). The diagnosis kit of this invention may be used in the aforementioned method for providing an indicator for diagnosing an allergy to a soybean or in a diagnosis method as described later. The diagnosis kit of this invention may comprise not only the at least one of the aforementioned antigens (1α) to (55α), but also an anti-IgE antibody labeled with an enzyme and a chromogenic or luminescent substrate serving as a substrate for the enzyme. Also, a fluorescent-labeled anti-IgE antibody may be used. In the diagnosis kit of this invention, the antigen may be provided in a state immobilized on a carrier. The diagnosis kit of this invention may also be provided together with instructions on the procedure for diagnosis or a package containing said instructions.

[1439] In another mode, the aforementioned diagnosis kit comprises a companion diagnostic agent for an allergy to a soybean. The companion diagnostic agent is used for identifying patients expected to respond to pharmaceutical products or identifying patients having the risk of severe adverse reactions to pharmaceutical products, or for studying the reactivity of pharmaceutical products in order to optimize treatment using the pharmaceutical products. Here, the optimization of treatment includes, for example, determination of dosage and administration, judgment regarding discontinuation of administration, and confirmation of an allergen component that is used to cause immunological tolerance.

[1440] The present invention further provides a composition for diagnosing an allergy to a soybean, comprising at least one of the aforementioned antigens (1α) to (55α). The diagnosis composition of this invention can be used in a diagnosis method as described below. The diagnosis composition of this invention may further comprise a pharmaceutically acceptable carrier and/or additives commonly used with the antigen of this invention depending on the need.

[1441] In one mode, the present invention provides a method for diagnosing an allergy to a soybean in a subject, the method comprising:
[1442] (i) contacting a sample obtained from the subject with an antigen;
[1443] (ii) detecting binding between an IgE antibody present in the sample from the subject and the antigen; and
[1444] (iii) when the binding between the IgE antibody in the subject and the antigen is detected, diagnosing the subject as being allergic to a soybean;
   wherein the antigen is at least one of proteins as defined above in any of (1α) to (55α). In this method, the steps (i) and (ii) are performed as described above regarding the corresponding steps of the method for providing an indicator for diagnosing an allergy to a soybean.

[1445] In another mode, the present invention provides a method for diagnosing an allergy to a soybean in a subject, the method comprising administering to the subject at least one of the aforementioned antigens (1α) to (55α). This method may be performed in the form of a skin test characterized by applying the antigen onto the skin. Examples of the skin test include various forms of tests, such as: a prick test in which a diagnosis composition is applied onto the skin and then a tiny prick to such an extent as not to provoke bleeding is made in the skin to allow an antigen to penetrate the skin, thereby observing a skin reaction; a scratch test in which a diagnosis composition is applied onto the skin and then the skin is lightly scratched to observe a reaction; a patch test in which a diagnosis composition in the form of cream, ointment, etc. is applied onto the skin to observe a reaction; and an intracutaneous test in which an antigen is administered intracutaneously to observe a reaction. If a skin reaction such as swelling occurs in a skin portion to which the antigen has been applied, the subject of interest is diagnosed as having an allergy to a soybean. The amount of the antigen to be applied to the skin in such tests can be, for example, not more than 100 μg per dose.

[1446] In the process of allergy diagnosis, a load test aiming to identify an antigen is often adopted. At least one of the aforementioned antigens (1α) to (55α) can be used as an active ingredient for a load test to diagnose an allergy to a soybean. Here, the antigen protein to be used in the load test may be a protein that has been expressed and purified and may be a protein that has been expressed in food or cooking ingredients, such as rice-based vaccine expressing pollen allergens which are obtained by transforming rice with a gene of a cedar pollen antigen and expressing the antigen protein in the rice.

[1447] In yet another mode, the present invention provides at least one of the aforementioned antigens (1α) to (55α), intended for use in the diagnosis of an allergy to a soybean. This also includes the provision of at least one of the aforementioned antigens (1α) to (55α) mixed with a known antigen.

[1448] In still another mode, the present invention provides use of at least one of the aforementioned antigens (1α) to (55α) for the production of a diagnostic agent for an allergy to a soybean.

[1449] Pharmaceutical Composition and Treatment Method (1)

[1450] The present invention provides a pharmaceutical composition comprising at least one of the aforementioned antigens (1α) to (55α). In one mode, the aforementioned pharmaceutical composition is used for the treatment and diagnosis of an allergy to a soybean.

[1451] The present invention also provides a method for treating an allergy to a soybean, the method comprising administering at least one of the aforementioned antigens (1 α) to (55α) to a patient in need of a treatment for an allergy to a soybean.

[1452] In another mode, the present invention provides at least one of the aforementioned antigens (1α) to (55α), intended for use in the treatment for an allergy to a soybean. In yet another mode, the present invention provides use of at least one of the aforementioned antigens (1α) to (55α) for the production of a therapeutic agent for an allergy to a soybean.

[1453] In the process of allergy treatment, a hyposensitization therapy aiming to induce immunological tolerance by administering an antigen to a patient is often adopted. The at least one of the aforementioned antigens (1α) to (55α) can be used as an active ingredient for a hyposensitization therapy for an allergy to a soybean. Here, the antigen protein to be used in the hyposensitization therapy may be a protein that has been expressed and purified and may be a protein that has been expressed in food or cooking ingredients, such as rice-based vaccine expressing pollen allergens which are obtained by transforming rice with a gene of a cedar pollen antigen and expressing the antigen protein in the rice.

[1454] The pharmaceutical composition of the present invention can be administered by common administration routes. Examples of common administration routes include oral, sublingual, percutaneous, intracutaneous, subcutaneous, intravascular, intranasal, intramuscular, intraperitoneal, and intrarectal administrations.

[1455] The pharmaceutical composition of the present invention can be used as a pharmaceutical composition to which a commonly used pharmaceutically acceptable adjuvant or excipient or any other additives (e.g., stabilizer, solubilizer, emulsifier, buffer, preservative, colorant) are added by a conventional method together with the antigen of this invention depending on the need. The dosage form of the pharmaceutical composition can be selected by those skilled in the art as appropriate depending on the administration route. The pharmaceutical composition can be in the form of, for example, tablet, capsule, troche, sublingual tablet, parenteral injection, intranasal spray, poultice, solution, cream, or lotion. The administration dose, frequency and/or period of the pharmaceutical composition of this invention can be selected by a physician as appropriate depending on the administration route and the patient's condition and characteristics such as age and body weight. For example, the pharmaceutical composition may be administered to an adult patient at a dose of not more than 100 μg per dose. The administration interval can be, for example, once daily, once weekly, twice weekly, once per three months or so. The administration period can be, for example, several weeks to several years. The pharmaceutical composition may be administered in such a manner that the dose is increased in incremental steps over the administration period.

[1456] Tester (1)

[1457] The present invention provides a tester comprising an antibody for at least one of the aforementioned antigens (1α) to (55α).

[1458] The antibody can be prepared by a conventional method. For example, the antibody may be prepared by immunizing a mammal such as rabbit with one of the aforementioned antigens (1α) to (55α). The antibody may be an Ig antibody, a polyclonal antibody, a monoclonal antibody, or an antigen-binding fragment thereof (e.g., Fab, F(ab′)₂, Fab′).

[1459] Further, in the aforementioned tester, the antibody may be provided in a form bound to a carrier. The type of the carrier is not particularly limited as long as it is usable for detection of binding between an antibody and an antigen. Any given carrier known to those skilled in the art can be used.

[1460] Examples of a method for determining the presence or absence of an antigen include the following methods: a method in which a prepared tester comprising an IgE antibody is contacted with a sample obtained from a food, a cooking ingredient, etc., ELISA or the like method is used to detect whether there is a binding between the IgE antibody and an antigen in the sample, and if the binding between the IgE antibody and the antigen is detected, it is determined that the antibody remains in the food, the cooking ingredient, etc. of interest; and a method in which filter paper is impregnated with a food or a cooking ingredient and reacted with an antibody solution so as to detect an antigen contained therein.

[1461] Another mode of the present invention includes a tester for determining the presence or absence of an antigen of an allergy to a soybean in an object of interest, the tester comprising a primer having a nucleotide sequence complementary to a portion of at least one of the nucleotide sequences of SEQ ID NOs: 1, 3, 5, 7, 9, 11, 13, 15, 69, 88, 105, 121, 138, 154, 158, 162, 168, 173, 188, 200, 203, 219, 232, 238, 241, 253, 279, 285, 290, 305, 319, 326, 333, 340, 347, 357, 366, 383, 393, 410, 417, 421, 428, 434, 440, 446, 452, 455, 459, 467, 472, 478, 484, 488, 494, 514, 517, 521, 524, 532, 540, 546, 552, 555, 559, 564, 571, 577, 583, 589, 598, 605, 612, 617 and 636. The primer has, for example, but not limited to, a nucleotide sequence complementary to, preferably, 12 residues, 15 bases, 20 bases, or 25 bases, in a 3′-terminal or central sequence in a partial sequence of at least one of the nucleotide sequences of SEQ ID NOs defined above in this paragraph. Particularly, when mRNA is of interest, the tester has a complementary primer of a poly-A tail. In a preferred mode, the tester comprising the primer mentioned above may further comprise a primer comprising a 5′-terminal nucleotide sequence, preferably a nucleotide sequence of 12 bases, 15 bases, 20 bases, or 25 bases, of at least one of the nucleotide sequences of SEQ ID NOs defined above in this paragraph.

[1462] For example, cDNA is amplified by PCR (Polymerase Chain Reaction) including RT-PCR using templated DNA or mRNA obtained from a soybean and the aforementioned complementary primer, and the sequence of the amplified cDNA is compared with the nucleotide sequences of SEQ ID NOs defined above in the previous paragraph to determine the presence or absence of the antigen. Amplification methods by PCR can be exemplified by RACE. In this respect, even if there exists a point mutation encoding the same amino acid in the comparison of the amplified cDNA with the nucleotide sequences of SEQ ID NOs defined above in the previous paragraph, or even if the nucleotide sequence of the amplified cDNA has insertion, deletion, substitution or addition of bases in the nucleotide sequences of SEQ ID NOs defined above in the previous paragraph, it is determined that the antigen is present when the amino acid sequence encoded by the cDNA has at least 70%, preferably at least 80, 90, 95, 98, or 99% identity to the amino acid sequence of SEQ ID NO: 2, 4, 6, 8, 10, 12, 14, 16, 70, 89, 106, 122, 139, 155, 159, 163, 169, 174, 189, 201, 204, 220, 233, 239, 242, 254, 280, 286, 291, 306, 320, 327, 334, 341, 348, 358, 367, 384, 394, 411, 418, 422, 429, 435, 441, 447, 453, 456, 460, 468, 473, 479, 485, 489, 495, 515, 518, 522, 525, 533, 541, 547, 553, 556, 560, 565, 572, 578, 584, 590, 599, 606, 613, 618 or 637.

[1463] In one mode, the aforementioned tester is used to determine the presence or absence of an antigen in cooking ingredients or in products of interest in a food production line. The tester may also be used for quality inspection of production lines and pre-shipment products by manufacturers, or may be used for self-checking of the presence or absence of an antigen in a food or cooking ingredients of interest by consumers.

[1464] Allergen-Free Food and the Like (1)

[1465] The present invention provides a soybean or processed product of soybean in which at least one of the aforementioned antigens (1α) to (55α) is eliminated or reduced.

[1466] The method for eliminating or reducing the antigen of the present invention in a soybean or processed products of soybean is not limited. The elimination or reduction of the antigen may be conducted by any method, as long as the method permits the elimination or reduction of the antigen.

[1467] For example, the soybean of the present invention whose antigen is eliminated or reduced may be obtained by preparing a soybean in which the expression of the antigen of the present invention is knocked out, using a gene knock-out technique. Any technique known to those skilled in the art such as genetic modification can be used as the gene knock-out technique.

[1468] An antigen of the present invention may be the artefact that an antigen of the present invention assumed the removal or a reduced soybean raw material as for the removal or the reduced processed products of soybean. In the case of using an ordinary soybean as a source ingredient, a treatment for removing or reducing the antigen of this invention is performed before or after preparation of a processed product of soybean. The methods for removing or reducing the antigen of the present invention in the processed products of soybean which assumed an ordinary soybean raw material include a method to remove protein component in food such as a high pressure treatment and elution with the neutral salt solution or the high temperature steam, and a method to perform hydrolysis, denaturation, or amino acid alteration (chemical modification, elimination, or the like of a side chain) by heat treatment and acid treatment.

[1469] Method foR Producing Antigen-Free Processed Product of Soybean

[1470] The present invention provides a method for producing a processed product of soybean in which an antigen is eliminated or reduced, the method comprising the step of confirming that the antigen is eliminated or reduced, in a production process of the processed product, wherein the antigen is at least one of the aforementioned antigens (1α) to (55α).

[1471] The step of confirming that the antigen is eliminated or reduced, in a production process of the processed product of soybean in which an antigen is eliminated or reduced may be performed by confirming the presence or absence of an antigen by the method described above in the subsection titled “Tester (1)”.

[1472] The production of the processed product of soybean in which an antigen is eliminated or reduced may be performed by the method described above in the subsection titled “Allergen-free food and the like (1)”.

[1473] Epitope of Antigen

[1474] Epitopes and amino acids important for binding activity against IgE antibodies from allergic patients within the epitopes were identified as shown in Examples 4 and 5 as to antigens identified as shown in Example 3 and known antigens Gly m 4, Gly m 5, Gly m 6 and Gly m 8.

[1475] The present invention provides polypeptides of the following (1β) to (60β) as polypeptides comprising an amino acid sequence specifically binding to an IgE antibody from an allergic patient.

[1476] (1β) Epitope of Endoplasmin Homolog Isoform X2 (Spot 1α)

[1477] In the present invention, the polypeptide (1β) can be any polypeptide selected from the group consisting of (1β-1) to (1β-4) as defined below:
[1478] (1β-1) a polypeptide comprising at least one amino acid sequence selected from the group consisting of SEQ ID NOs: 652, 655 and 657-660;
[1479] (1β-2) a polypeptide comprising the amino acid sequence of XXKXEXXX (SEQ ID NO: 650), preferably a polypeptide comprising the amino acid sequence of XTKXEXXX (SEQ ID NO: 651), more preferably a polypeptide comprising an amino acid sequence in which any 1, 2, 3, 4 or 5 of the amino acids at positions 1, 2, 4, and 6-8 of SEQ ID NO: 652 are substituted by alanine, further preferably a polypeptide comprising an amino acid sequence in which any 1, 2, 3 or 4 of the amino acids at positions 1, 4, and 6-8 of SEQ ID NO: 652 are substituted by other amino acids;
[1480] (1β-3) a polypeptide comprising the amino acid sequence of XXXKDNVXX (SEQ ID NO: 653), preferably a polypeptide comprising the amino acid sequence of XLXKDNVXX (SEQ ID NO: 654), more preferably a polypeptide comprising an amino acid sequence in which any 1, 2, 3, 4 or 5 of the amino acids at positions 1-3, 8, and 9 of SEQ ID NO: 655 are substituted by alanine, further preferably a polypeptide comprising an amino acid sequence in which any 1, 2, 3 or 4 of the amino acids at positions 1, 3, 8, and 9 of SEQ ID NO: 655 are substituted by other amino acids; and
[1481] (1β-4) a polypeptide comprising the amino acid sequence of EEEDDXXXXXEXXXX (SEQ ID NO: 656), more preferably a polypeptide comprising an amino acid sequence in which any 1, 2, 3, 4, 5, 6, 7, 8 or 9 of the amino acids at positions 6-10 and 12-15 of SEQ ID NO: 657 are substituted by alanine, further preferably a polypeptide comprising an amino acid sequence in which any 1, 2, 3, 4, 5, 6, 7, 8 or 9 of the amino acids at positions 6-10 and 12-15 of SEQ ID NO: 657 are substituted by other amino acids.

[1482] (2β) Epitope of Heat Shock Cognate Protein 80 (spot 2α)

[1483] In the present invention, the polypeptide (2β) can be any polypeptide selected from the group consisting of (2β-1) to (2β-9) as defined below:
[1484] (2β-1) a polypeptide comprising at least one amino acid sequence selected from the group consisting of SEQ ID NOs: 663, 666, 669, 670-672, 675, 676-678, 681, 684, 687, 689 and 690-692;
[1485] (2β-2) a polypeptide comprising the amino acid sequence of DXXDKXXXX (SEQ ID NO: 661), preferably a polypeptide comprising the amino acid sequence of DXXDKXRXX (SEQ ID NO: 662), more preferably a polypeptide comprising an amino acid sequence in which any 1, 2, 3, 4, 5 or 6 of the amino acids at positions 2, 3, and 6-9 of SEQ ID NO: 663 are substituted by alanine, further preferably a polypeptide comprising an amino acid sequence in which any 1, 2, 3, 4 or 5 of the amino acids at positions 2, 3, 6, 8, and 9 of SEQ ID NO: 663 are substituted by other amino acids;
[1486] (2β-3) a polypeptide comprising the amino acid sequence of XXXXKSKLXXXXXXX (SEQ ID NO: 664), preferably a polypeptide comprising the amino acid sequence of XXXXKSKLXXXPXXX (SEQ ID NO: 665), more preferably a polypeptide comprising an amino acid sequence in which any 1, 2, 3, 4, 5, 6, 7, 8, 9, 10 or 11 of the amino acids at positions 1-4, and 9-15 of SEQ ID NO: 666 are substituted by alanine, further preferably a polypeptide comprising an amino acid sequence in which any 1, 2, 3, 4, 5, 6, 7, 8, 9 or 10 of the amino acids at positions 1-4, 9-11, and 13-15 of SEQ ID NO: 666 are substituted by other amino acids;
[1487] (2β-4) a polypeptide comprising the amino acid sequence of XPDKX (SEQ ID NO: 667), preferably a polypeptide comprising the amino acid sequence of IPDKX (SEQ ID NO: 668), more preferably a polypeptide comprising an amino acid sequence in which any 1 or 2 of the amino acids at positions 1 and 5 of SEQ ID NO: 669 are substituted by alanine, further preferably a polypeptide comprising an amino acid sequence in which any 1 or 2 of the amino acids at positions 1 and 5 of SEQ ID NO: 669 are substituted by other amino acids;
[1488] (2β-5) a polypeptide comprising the amino acid sequence of XXFSKXXXXXXXEDX (SEQ ID NO: 673), preferably a polypeptide comprising the amino acid sequence of XXFS EDS (SEQ ID NO: 674), more preferably a polypeptide comprising an amino acid sequence in which any 1, 2, 3, 4, 5, 6, 7, 8, 9 or 10 of the amino acids at positions 1, 2, 6-12 and 15 of SEQ ID NO: 675 are substituted by alanine, further preferably a polypeptide comprising an amino acid sequence in which any 1, 2, 3, 4, 5, 6, 7, 8, or 9 of the amino acids at positions 1, 2 and 6-12 of SEQ ID NO: 675 are substituted by other amino acids;
[1489] (2β-6) a polypeptide comprising the amino acid sequence of XXXXDXXXXEXXXDX (SEQ ID NO: 679), preferably a polypeptide comprising the amino acid sequence of XXXXDKIRXEXXXDK (SEQ ID NO: 680), more preferably a polypeptide comprising an amino acid sequence in which any 1, 2, 3, 4, 5, 6, 7, 8, 9, 10, 11 or 12 of the amino acids at positions 1-4, 6-9, 11-13 and 15 of SEQ ID NO: 681 are substituted by alanine, further preferably a polypeptide comprising an amino acid sequence in which any 1, 2, 3, 4, 5, 6, 7 or 8 of the amino acids at positions 1-4, 9, 11-13 of SEQ ID NO: 681 are substituted by other amino acids;
[1490] (2β-7) a polypeptide comprising the amino acid sequence of XYXXRXXXXQNXXXX (SEQ ID NO: 682), preferably a polypeptide comprising an amino acid sequence in which any 1, 2, 3, 4, 5, 6, 7, 8, 9, 10 or 11 of the amino acids at positions 1, 3, 4, 6-9, and 12-15 of SEQ ID NO: 684 are substituted by alanine, more preferably a polypeptide comprising an amino acid sequence in which any 1, 2, 3, 4, 5, 6, 7, 8, 9, 10 or 11 of the amino acids at positions 1, 3, 4, 6-9, and 12-15 of SEQ ID NO: 684 are substituted by other amino acids; (43-8) a polypeptide comprising the amino acid sequence of DXXXRXXXXQNXXXX (SEQ ID NO: 685), preferably a polypeptide comprising an amino acid sequence in which any 1, 2, 3, 4, 5, 6, 7, 8, 9, 10 or 11 of the amino acids at positions 2-4, 6-9, and 12-15 of SEQ ID NO: 687 are substituted by alanine, more preferably a polypeptide comprising an amino acid sequence in which any 1, 2, 3, 4, 5, 6, 7, 8, 9, 10 or 11 of the amino acids at positions 2-4, 6-9, and 12-15 of SEQ ID NO: 687 are substituted by other amino acids; (2β-9) a polypeptide comprising the amino acid sequence of RKPXXXXXXXXAAXX (SEQ ID NO: 688), preferably a polypeptide comprising an amino acid sequence in which any 1, 2, 3, 4, 5, 6, 7, 8, 9, or 10 of the amino acids at positions 4-11, 14 and 15 of SEQ ID NO: 689 are substituted by alanine, more preferably a polypeptide comprising an amino acid sequence in which any 1, 2, 3, 4, 5, 6, 7, 8, 9, or 10 of the amino acids at positions 4-11, 14 and 15 of SEQ ID NO: 689 are substituted by other amino acids.

[1491] (3β) Epitope of Cell Division Cycle Protein 48 Homolog (Spot 3α)

[1492] In the present invention, the polypeptide (3 0 can be any polypeptide selected from the group consisting of (3β-1) to (3β-4) as defined below:
[1493] (3β-1) a polypeptide comprising at least one amino acid sequence selected from the group consisting of SEQ ID NOs: 695, 697, 699 and 700-716;
[1494] (3β-2) a polypeptide comprising the amino acid sequence of XXXX RLXEX (SEQ ID NO: 693), preferably a polypeptide comprising the amino acid sequence of XXXLKREDEERLDEV (SEQ ID NO: 694), more preferably a polypeptide comprising an amino acid sequence in which any 1, 2, 3, 4, 5, 6, 7, 8, 9, 10, 11 or 12 of the amino acids at positions 1-10, 13 and 15 of SEQ ID NO: 695 are substituted by alanine, further preferably a polypeptide comprising an amino acid sequence in which any 1, 2 or 3 of the amino acids at positions 1-3 of SEQ ID NO: 695 are substituted by other amino acids;
[1495] (3β-3) a polypeptide comprising the amino acid sequence of XXXXXXXXXXXXXDE (SEQ ID NO: 696), preferably a polypeptide comprising an amino acid sequence in which any 1, 2, 3, 4, 5, 6, 7, 8, 9, 10, 11, 12 or 13 of the amino acids at positions 1-13 of SEQ ID NO: 697 are substituted by alanine, more preferably a polypeptide comprising an amino acid sequence in which any 1, 2, 3, 4, 5, 6, 7, 8, 9, 10, 11, 12 or 13 of the amino acids at positions 1-13 of SEQ ID NO: 697 are substituted by other amino acids;
[1496] (3β-4) a polypeptide comprising the amino acid sequence of XXXXGDR (SEQ ID NO: 698), preferably a polypeptide comprising an amino acid sequence in which any 1, 2, 3 or 4 of the amino acids at positions 1-4 of SEQ ID NO: 699 are substituted by alanine, more preferably a polypeptide comprising an amino acid sequence in which any 1, 2, 3 or 4 of the amino acids at positions 1-4 of SEQ ID NO: 699 are substituted by other amino acids.

[1497] In one mode, the polypeptide (3β) may not comprise the full-length amino acid sequence (SEQ ID NO: 16) of Cell division cycle protein 48 homolog or a variant or a homolog having 100% or at least 90%, at least 80% or at least 70% identity to the total length of this amino acid sequence.

[1498] SEQ ID NOs: 695, 697, 699 and 700-716 correspond to amino acids 191-205 (SEQ ID NO: 695), amino acids 21-35 (SEQ ID NO: 697), amino acids 779-785 (SEQ ID NO: 699), amino acids 8-14 (SEQ ID NO: 700), amino acids 49-56 (SEQ ID NO: 701), amino acids 101-107 (SEQ ID NO: 702), amino acids 161-175 (SEQ ID NO: 703), amino acids 291-305 (SEQ ID NO: 704), amino acids 316-323 (SEQ ID NO: 705), amino acids 327-333 (SEQ ID NO: 706), amino acids 341-355 (SEQ ID NO: 707), amino acids 361-369 (SEQ ID NO: 708), amino acids 431-445 (SEQ ID NO: 709), amino acids 451-465 (SEQ ID NO: 710), amino acids 501-515 (SEQ ID NO: 711), amino acids 565-572 (SEQ ID NO: 712), amino acids 631-645 (SEQ ID NO: 713), amino acids 703-712 (SEQ ID NO: 714), amino acids 711-715 (SEQ ID NO: 715), and amino acids 721-735 (SEQ ID NO: 716), respectively, of SEQ ID NO: 16.

[1499] (4β) Epitope of Embryo-Specific Urease Isoform X1 (Spot 4α)

[1500] In the present invention, the polypeptide (4β) can be any polypeptide selected from the group consisting of (4β-1) to (4β-5) as defined below:
[1501] (4β-1) a polypeptide comprising at least one amino acid sequence selected from the group consisting of SEQ ID NOs: 719, 722,725, 726-728 and 731;
[1502] (4β-2) a polypeptide comprising the amino acid sequence of XXXXXXXKED (SEQ ID NO: 717), preferably a polypeptide comprising the amino acid sequence of XXXXXEXKED (SEQ ID NO: 718), more preferably a polypeptide comprising an amino acid sequence in which any 1, 2, 3, 4, 5, 6 or 7 of the amino acids at positions 1-7 of SEQ ID NO: 719 are substituted by alanine, further preferably a polypeptide comprising an amino acid sequence in which any 1, 2, 3, 4, 5 or 6 of the amino acids at positions 1-5 and 7 of SEQ ID NO: 719 are substituted by other amino acids;
[1503] (4β-3) a polypeptide comprising the amino acid sequence of KXXLGDX (SEQ ID NO: 720), preferably a polypeptide comprising the amino acid sequence of KIXLGDX (SEQ ID NO: 721), more preferably a polypeptide comprising an amino acid sequence in which any 1, 2 or 3 of the amino acids at positions 2, 3 and 7 of SEQ ID NO: 722 are substituted by alanine, further preferably a polypeptide comprising an amino acid sequence in which any 1, 2 or 3 of the amino acids at positions 3 and 7 of SEQ ID NO: 722 are substituted by other amino acids;
[1504] (4β-4) a polypeptide comprising the amino acid sequence of XXXDXFXKXE (SEQ ID NO: 723), preferably a polypeptide comprising the amino acid sequence of XXXDXFXKIE (SEQ ID NO: 724), more preferably a polypeptide comprising an amino acid sequence in which any 1, 2, 3, 4, 5 or 6 of the amino acids at positions 1-3, 5, 7 and 9 of SEQ ID NO: 725 are substituted by alanine, further preferably a polypeptide comprising an amino acid sequence in which any 1, 2, 3, 4 or 5 of the amino acids at positions 1-3, 5 and 7 of SEQ ID NO: 725 are substituted by other amino acids;
[1505] (4β-5) a polypeptide comprising the amino acid sequence of XXXHXLXXXNKXXEA (SEQ ID NO: 729), preferably a polypeptide comprising the amino acid sequence of XXVHXLXXXNKXXEA (SEQ ID NO: 730), more preferably a polypeptide comprising an amino acid sequence in which any 1, 2, 3, 4, 5, 6, 7, 8 or 9 of the amino acids at positions 1-3, 5, 7-9,12 and 13 of SEQ ID NO: 731 are substituted by alanine, further preferably a polypeptide comprising an amino acid sequence in which any 1, 2, 3, 4, 5, 6, 7 or 8 of the amino acids at positions 1, 2, 5, 7-9, 12 and 13 of SEQ ID NO: 731 are substituted by other amino acids.

[1506] (5β) alpha-1,4 glucan phosphorylase L isozyme, chloroplastic/amyloplastic (spot 5α)

[1507] In the present invention, the polypeptide (5β) can be any polypeptide selected from the group consisting of (5β-1) to (5β-2) as defined below:
[1508] (5β-1) a polypeptide comprising at least one amino acid sequence selected from the group consisting of SEQ ID NOs: 734 and 735-738;
[1509] (5β-2) a polypeptide comprising the amino acid sequence of XXXXXXGLXKXRXEX (SEQ ID NO: 732), preferably a polypeptide comprising the amino acid sequence of XXXXXXGLXKXRXEG (SEQ ID NO: 733), more preferably a polypeptide comprising an amino acid sequence in which any 1, 2, 3, 4, 5, 6, 8, 9 or 10 of the amino acids at positions 1-6, 9, 11, 13 and 15 of SEQ ID NO: 734 are substituted by alanine, further preferably a polypeptide comprising an amino acid sequence in which any 1, 2, 3, 4, 5, 6, 7, 8 or 9 of the amino acids at positions 1-6, 9, 11 and 13 of SEQ ID NO: 734 are substituted by other amino acids.

[1510] (6β) Epitope of Aconitate Hydratase 1 (Spot 6α)

[1511] In the present invention, the polypeptide (6β) can be a polypeptide comprising at least one amino acid sequence selected from the group consisting of SEQ ID NOs: 739 and 740.

[1512] (7β) Epitope of Methionine Synthase (Spot 7α)

[1513] In the present invention, the polypeptide (7β) can be any polypeptide selected from the group consisting of (7β-1) to (7β-2) as defined below:
[1514] (7β-1) a polypeptide comprising at least one amino acid sequence selected from the group consisting of SEQ ID NOs: 741 and 744;
[1515] (7β-2) a polypeptide comprising the amino acid sequence of XXXXXXXKDXVEDXE (SEQ ID NO: 742), preferably a polypeptide comprising the amino acid sequence of XXXXXXXKDEVEDXE (SEQ ID NO: 743), more preferably a polypeptide comprising an amino acid sequence in which any 1, 2, 3, 4, 5, 6, 7, 8 or 9 of the amino acids at positions 1-7, 10 and 14 of SEQ ID NO: 744 are substituted by alanine, further preferably a polypeptide comprising an amino acid sequence in which any 1, 2, 3, 4, 5, 6, 7 or 8 of the amino acids at positions 1-7 and 14 of SEQ ID NO: 744 are substituted by other amino acids.

[1516] (9β) Epitope of Lysine-tRNA Ligase, Cytoplasmic-Like Isoform X2 (Spot 9α)

[1517] In the present invention, the polypeptide (9β) can be any polypeptide selected from the group consisting of (9β-1) to (9β-3) as defined below:
[1518] (9β-1) a polypeptide comprising at least one amino acid sequence selected from the group consisting of SEQ ID NOs: 747 and 749;
[1519] (9β-2) a polypeptide comprising the amino acid sequence of XXEXXXXKDX (SEQ ID NO: 745), preferably a polypeptide comprising the amino acid sequence of NXEXXXXKDX (SEQ ID NO: 746), more preferably a polypeptide comprising an amino acid sequence in which any 1, 2, 3, 4, 5, 6 or 7 of the amino acids at positions 1, 2, 4-7 and 10 of SEQ ID NO: 747 are substituted by alanine, further preferably a polypeptide comprising an amino acid sequence in which any 1, 2, 3, 4, 5 or 6 of the amino acids at positions 2, 4-7 and 10 of SEQ ID NO: 747 are substituted by other amino acids;
[1520] (9β-3) a polypeptide comprising the amino acid sequence of LDFLEXET (SEQ ID NO: 748), preferably a polypeptide comprising an amino acid sequence in which the amino acid at position 6 of SEQ ID NO: 749 is substituted by alanine, more preferably a polypeptide comprising an amino acid sequence in which the amino acid at position 6 of SEQ ID NO: 749 is substituted by another amino acid.
[1521] (11β) Epitope of Polyadenylate-Binding Protein 8 Isoform X3 (Spot 11α)

[1522] In the present invention, the polypeptide (11β) can be any polypeptide selected from the group consisting of (11β-1) to (11β-2) as defined below:
[1523] (11β-1) a polypeptide comprising at least one amino acid sequence selected from the group consisting of SEQ ID NOs: 753 and 754;
[1524] (11β-2) a polypeptide comprising the amino acid sequence of PLXQQXXXXX (SEQ ID NO: 751), preferably a polypeptide comprising the amino acid sequence of PLXQQGXXXX (SEQ ID NO: 752), more preferably a polypeptide comprising an amino acid sequence in which any 1, 2, 3, 4, 5 or 6 of the amino acids at positions 3 and 6-10 of SEQ ID NO: 753 are substituted by alanine, further preferably a polypeptide comprising an amino acid sequence in which any 1, 2, 3, 4 or 5 of the amino acids at positions 3 and 7-10 of SEQ ID NO: 753 are substituted by other amino acids.

[1525] (12β) Epitope of pyrophosphate-fructose 6-phosphate 1-phosphotransferase subunit alpha-like (Spot 12α)

[1526] In the present invention, the polypeptide (12β) can be a polypeptide comprising the amino acid sequence of SEQ ID NO: 755.

[1527] (13β) Epitope of Protein Disulfide Isomerase-Like Protein Precursor (Spot 13α)

[1528] In the present invention, the polypeptide (13β) can be any polypeptide selected from the group consisting of (13β-1) to (13β-2) as defined below:
[1529] (13β-1) a polypeptide comprising the amino acid sequence of SEQ ID NO: 758;
[1530] (13β-2) a polypeptide comprising the amino acid sequence of XXGXXXXXXXXXXXE (SEQ ID NO: 756), preferably a polypeptide comprising the amino acid sequence of XXGXLXXXXGXRTXE (SEQ ID NO: 757), more preferably a polypeptide comprising an amino acid sequence in which any 1, 2, 3, 4, 5, 6, 7, 8, 9, 10, 11, 12 or 13 of the amino acids at positions 1, 2 and 4-14 of SEQ ID NO: 758 are substituted by alanine, further preferably a polypeptide comprising an amino acid sequence in which any 1, 2, 3, 4, 5, 6, 7, 8 or 9 of the amino acids at positions 1, 2, 4, 6-9, 11 and 14 of SEQ ID NO: 758 are substituted by other amino acids.

[1531] (14β) Epitope of V-Type Proton ATPase Subunit B2 (Spot 14α)

[1532] In the present invention, the polypeptide (14β) can be any polypeptide selected from the group consisting of (14β-1) to (14β-3) as defined below:
[1533] (14β-1) a polypeptide comprising at least one amino acid sequence selected from the group consisting of SEQ ID NOs: 761 and 764;
[1534] (14β-2) a polypeptide comprising the amino acid sequence of XXXXXLLXXXXEEDN (SEQ ID NO: 759), preferably a polypeptide comprising the amino acid sequence of XXXXXLLEXXXEEDN (SEQ ID NO: 760), more preferably a polypeptide comprising an amino acid sequence in which any 1, 2, 3, 4, 5, 6, 7, 8 or 9 of the amino acids at positions 1-5 and 8-11 of SEQ ID NO: 761 are substituted by alanine, further preferably a polypeptide comprising an amino acid sequence in which any 1, 2, 3, 4, 5, 6, 7 or 8 of the amino acids at positions 1-5 and 9-11 of SEQ ID NO: 761 are substituted by other amino acids;
[1535] (14β-3) a polypeptide comprising the amino acid sequence of RKXXXXXXXXXYXNX (SEQ ID NO: 762), preferably a polypeptide comprising the amino acid sequence of RKDHSXXXXXLYANX (SEQ ID NO: 763), more preferably a polypeptide comprising an amino acid sequence in which any 1, 2, 3, 4, 5, 6, 7, 8, 9, 10 or 11 of the amino acids at positions 3-11, 13 and 15 of SEQ ID NO: 764 are substituted by alanine, further preferably a polypeptide comprising an amino acid sequence in which any 1, 2, 3, 4, 5 or 6 of the amino acids at positions 6-10 and 15 of SEQ ID NO: 764 are substituted by other amino acids.

[1536] (15β) Epitope of UTP-glucose-1-phosphate uridylyltransferase (spot 15α, 16α)

[1537] In the present invention, the polypeptide (15β) can be any polypeptide selected from the group consisting of (15f3-1) to (150-2) as defined below:
[1538] (15β-1) a polypeptide comprising the amino acid sequence of SEQ ID NO: 766;
[1539] (15β-2) a polypeptide comprising the amino acid sequence of XGKXXXXX XXXXXX (SEQ ID NO: 765), preferably a polypeptide comprising an amino acid sequence in which any 1, 2, 3, 4, 5, 6, 7, 8, 9, 10, 11, 12 or 13 of the amino acids at positions 1 and 4-15 of SEQ ID NO: 766 are substituted by alanine, more preferably a polypeptide comprising an amino acid sequence in which any 1, 2, 3, 4, 5, 6, 7, 8, 9, 10, 11, 12 or 13 of the amino acids at positions 1 and 4-15 of SEQ ID NO: 766 are substituted by other amino acids.

[1540] Epitope of Guanosine Nucleotide Diphosphate Dissociation Inhibitor 2 (Spot 17α)

[1541] In the present invention, the polypeptide (17β) can be a polypeptide comprising the amino acid sequence of SEQ ID NO: 767.

[1542] (18β) Epitope of Hypothetical Protein GLYMA _10G028300 (Spot 18α)

[1543] In the present invention, the polypeptide (18β) can be any polypeptide selected from the group consisting of (18β-1) to (18β-3) as defined below: (18β-1) a polypeptide comprising at least one amino acid sequence selected from the group consisting of SEQ ID NOs: 750, 768, 771, 772 and 775;
[1544] (18B-2) a polypeptide comprising the amino acid sequence of XXXXXXXNXXIFEED (SEQ ID NO: 769), preferably a polypeptide comprising the amino acid sequence of XXXXXXXNXYIFEED (SEQ ID NO: 770), more preferably a polypeptide comprising an amino acid sequence in which any 1, 2, 3, 4, 5, 6, 7, 8 or 9 of the amino acids at positions 1-7, 9 and 10 of SEQ ID NO: 771 are substituted by alanine, further preferably a polypeptide comprising an amino acid sequence in which any 1, 2, 3, 4, 5, 6, 7 or 8 of the amino acids at positions 1-7 and 9 of SEQ ID NO: 771 are substituted by other amino acids;
[1545] (18β-3) a polypeptide comprising the amino acid sequence of XELPREXRXX (SEQ ID NO: 773), preferably a polypeptide comprising the amino acid sequence of XELPREERXX (SEQ ID NO: 774), more preferably a polypeptide comprising an amino acid sequence in which any 1, 2, 3 or 4 of the amino acids at positions 1, 7, 9 and 10 of SEQ ID NO: 775 are substituted by alanine, further preferably a polypeptide comprising an amino acid sequence in which any 1, 2 or 3 of the amino acids at positions 1, 9 and 10 of SEQ ID NO: 775 are substituted by other amino acids.

[1546] (19β) Epitope of Sucrose Binding Protein Homolog S-64 (Spot 19α)

[1547] In the present invention, the polypeptide (19β) can be any polypeptide selected from the group consisting of (19f3-1) to (19β-5) as defined below: (19β-1) a polypeptide comprising at least one amino acid sequence selected from the group consisting of SEQ ID NOs: 778, 781, 784, 786 and 787;
[1548] (19β-2) a polypeptide comprising the amino acid sequence of XXXXXPLYXXXXDEX (SEQ ID NO: 776), preferably a polypeptide comprising the amino acid sequence of XXXXXPLYIXXXDEX (SEQ ID NO: 777), more preferably a polypeptide comprising an amino acid sequence in which any 1, 2, 3, 4, 5, 6, 7, 8, 9 or 10 of the amino acids at positions 1-5, 9-12 and 15 of SEQ ID NO: 778 are substituted by alanine, further preferably a polypeptide comprising an amino acid sequence in which any 1, 2, 3, 4, 5, 6, 7, 8 or 9 of the amino acids at positions 1-5, 10-12 and 15 of SEQ ID NO: 778 are substituted by other amino acids;
[1549] (19β-3) a polypeptide comprising the amino acid sequence of XXXXXXXXRXRRXXX (SEQ ID NO: 779), preferably a polypeptide comprising the amino acid sequence of XXXXXSXXRXRRXXX (SEQ ID NO: 780), more preferably a polypeptide comprising an amino acid sequence in which any 1, 2, 3, 4, 5, 6, 7, 8, 9, 10, 11 or 12 of the amino acids at positions 1-8, 10 and 13-15 of SEQ ID NO: 781 are substituted by alanine, further preferably a polypeptide comprising an amino acid sequence in which any 1, 2, 3, 4, 5, 6, 7, 8, 9, 10 or 11 of the amino acids at positions 1-5, 7, 8, 10 and 13-15 of SEQ ID NO: 782 are substituted by other amino acids;
[1550] (19β-4) a polypeptide comprising the amino acid sequence of XXXXXXXXXXEEEXX (SEQ ID NO: 782), preferably a polypeptide comprising the amino acid sequence of XKEEEHQEXXEEEQX (SEQ ID NO: 783), more preferably a polypeptide comprising an amino acid sequence in which any 1, 2, 3, 4, 5, 6, 7, 8, 9, 10, 11 or 12 of the amino acids at positions 1-10, 14 and 15 of SEQ ID NO: 784 are substituted by alanine, further preferably a polypeptide comprising an amino acid sequence in which any 1, 2, 3 or 4 of the amino acids at positions 1, 9, 10 and 15 of SEQ ID NO: 784 are substituted by other amino acids;
[1551] (19β-5) a polypeptide comprising the amino acid sequence of XXGKXXXXXXXXXXX (SEQ ID NO: 785), preferably a polypeptide comprising an amino acid sequence in which any 1, 2, 3, 4, 5, 6, 7, 8, 9, 10, 11, 12 or 13 of the amino acids at positions 1, 2 and 5-15 of SEQ ID NO: 786 are substituted by alanine, more preferably a polypeptide comprising an amino acid sequence in which any 1, 2, 3, 4, 5, 6, 7, 8, 9, 10, 11, 12 or 13 of the amino acids at positions 1, 2 and 5-15 of SEQ ID NO: 786 are substituted by other amino acids.

[1552] (20β) Epitope of Seed Biotin-Containing Protein SBP65 (Spot 20α)

[1553] In the present invention, the polypeptide (20β) can be a polypeptide comprising at least one amino acid sequence selected from the group consisting of SEQ ID NOs: 788-792.

[1554] In one mode, the polypeptide (20β) may not comprise the full-length amino acid sequence (SEQ ID NO: 12) of Seed biotin-containing protein SBP65 or a variant or a homolog having 100% or at least 90%, at least 80% or at least 70% identity to the total length of this amino acid sequence.

[1555] SEQ ID NOs: 788-792 correspond to amino acids 131-145 (SEQ ID NO: 788), amino acids 251-258 (SEQ ID NO: 789), amino acids 281-295 (SEQ ID NO: 790), amino acids 441-448 (SEQ ID NO: 791), and amino acids 531-545 (SEQ ID NO: 792), respectively, of SEQ ID NO: 12.

[1556] (21β) Epitope of Ribulose Bisphosphate Carboxylase Large Chain (Spot 21α)

[1557] In the present invention, the polypeptide (21β) can be a polypeptide comprising at least one amino acid sequence selected from the group consisting of SEQ ID NOs: 793-802.

[1558] In one mode, the polypeptide (21β) may not comprise the full-length amino acid sequence (SEQ ID NO: 4) of Ribulose bisphosphate carboxylase large chain or a variant or a homolog having 100% or at least 90%, at least 80% or at least 70% identity to the total length of this amino acid sequence.

[1559] SEQ ID NOs: 793-802 correspond to amino acids 31-34 (SEQ ID NO: 793), amino acids 101-108 (SEQ ID NO: 794), amino acids 201-209 (SEQ ID NO: 795), amino acids 221-235 (SEQ ID NO: 796), and amino acids 237-245 (SEQ ID NO: 797), and amino acids 291-295 (SEQ ID NO: 798), amino acids 351-365 (SEQ ID NO: 799), amino acids 411-417 (SEQ ID NO: 800), amino acids 431-445 (SEQ ID NO: 801), and amino acids 461-475 (SEQ ID NO: 802), respectively, of SEQ ID NO: 4.

[1560] (22β) Epitope of Gamma-Glutamyl Hydrolase (Spot 22α)

[1561] In the present invention, the polypeptide (22β) can be a polypeptide comprising at least one amino acid sequence selected from the group consisting of SEQ ID NOs: 803-808.

[1562] In one mode, the polypeptide (22β) may not comprise the full-length amino acid sequence (SEQ ID NO: 6) of Gamma-glutamyl hydrolase or a variant or a homolog having 100% or at least 90%, at least 80% or at least 70% identity to the total length of this amino acid sequence.

[1563] SEQ ID NOs: 803-808 correspond to amino acids 61-75 (SEQ ID NO: 803), amino acids 161-175 (SEQ ID NO: 804), amino acids 241-255 (SEQ ID NO: 805), amino acids 261-275 (SEQ ID NO: 806), amino acids 288-294 (SEQ ID NO: 807), and amino acids 301-315 (SEQ ID NO: 808), respectively, of SEQ ID NO: 6.

[1564] (23β) Epitope of Guanine Nucleotide-Binding Protein Subunit Beta-Like Protein (Spot 23 α)

[1565] In the present invention, the polypeptide (23β) can be a polypeptide comprising at least one amino acid sequence selected from the group consisting of SEQ ID NOs: 809-812.

[1566] In one mode, the polypeptide (23β) may not comprise the full-length amino acid sequence (SEQ ID NO: 8) of Guanine nucleotide-binding protein subunit beta-like protein or a variant or a homolog having 100% or at least 90%, at least 80% or at least 70% identity to the total length of this amino acid sequence.

[1567] SEQ ID NOs: 809-812 correspond to amino acids 41-55 (SEQ ID NO: 809), amino acids 111-125 (SEQ ID NO: 810), amino acids 227-235 (SEQ ID NO: 811), and amino acids 270-278 (SEQ ID NO: 812), respectively, of SEQ ID NO: 8.

[1568] (24β) Epitope of Protein SLE3 (Spot 24α)

[1569] In the present invention, the polypeptide (24β) can be a polypeptide comprising the amino acid sequence of SEQ ID NO: 813.

[1570] In one mode, the polypeptide (24β) may not comprise the full-length amino acid sequence (SEQ ID NO: 10) of Protein SLE3 or a variant or a homolog having 100% or at least 90%, at least 80% or at least 70% identity to the total length of this amino acid sequence.

[1571] SEQ ID NO: 813 corresponds to amino acids 71-85 of SEQ ID NO: 10.

[1572] (25β) Epitope of Succinyl-CoA Ligase [ADP-Forming] Subunit Beta, Mitochondrial (Spot 25α)

[1573] In the present invention, the polypeptide (25β) can be a polypeptide comprising at least one amino acid sequence selected from the group consisting of SEQ ID NOs: 814 and 815.

[1574] (26β) Epitope of Phosphoglycerate Kinase, Cytosolic (Spot 26α)

[1575] In the present invention, the polypeptide (26β) can be any polypeptide selected from the group consisting of (26β-1) and (2613-2) as defined below:
[1576] (26β-1) a polypeptide comprising at least one amino acid sequence selected from the group consisting of SEQ ID NOs: 816 and 819; and
[1577] (26β-2) a polypeptide comprising the amino acid sequence of FDKXXXX (SEQ ID NO: 817), preferably a polypeptide comprising the amino acid sequence of FDKFXXX (SEQ ID NO: 818), more preferably a polypeptide comprising an amino acid sequence in which any 1, 2, 3 or 4 of the amino acids at positions 4 to 7 of SEQ ID NO: 819 are substituted by alanine, further preferably a polypeptide comprising an amino acid sequence in which any 1, 2 or 3 of the amino acids at positions 5 to 7 of SEQ ID NO: 819 are substituted by other amino acids.

[1578] (27β) Epitope of Alcohol Dehydrogenase 1 (Spot 27α)

[1579] In the present invention, the polypeptide (27β) can be a polypeptide comprising the amino acid sequence of SEQ ID NO: 820.

[1580] (28β) Epitope of 35 kDa Seed Maturation Protein Isoform X1 (Spot 28α)

[1581] In the present invention, the polypeptide (28β) can be any polypeptide selected from the group consisting of (28β-1) to (28β-4) as defined below:
[1582] (28β-1) a polypeptide comprising at least one amino acid sequence selected from the group consisting of SEQ ID NOs: 823, 826, 829 and 830-835;
[1583] (28β-2) a polypeptide comprising the amino acid sequence of XQXXXXENKP (SEQ ID NO: 821), preferably a polypeptide comprising the amino acid sequence of EQXQXXENKP (SEQ ID NO: 822), more preferably a polypeptide comprising an amino acid sequence in which any 1, 2, 3, 4 or 5 of the amino acids at positions 1 and 3-6 of SEQ ID NO: 823 are substituted by alanine, further preferably a polypeptide comprising an amino acid sequence in which any 1, 2 or 3 of the amino acids at positions 3, 5 and 6 of SEQ ID NO: 823 are substituted by other amino acids;
[1584] (28β-3) a polypeptide comprising the amino acid sequence of XKXXXXEKXXXXXXX (SEQ ID NO: 824), preferably a polypeptide comprising the amino acid sequence of XKDXXXEKXXXXXDX (SEQ ID NO: 825), more preferably a polypeptide comprising an amino acid sequence in which any 1, 2, 3, 4, 5, 6, 7, 8, 9, 10, 11 or 12 of the amino acids at positions 1, 3-6 and 9-15 of SEQ ID NO: 826 are substituted by alanine, further preferably a polypeptide comprising an amino acid sequence in which any 1, 2, 3, 4, 5, 6, 7, 8, 9 or 10 of the amino acids at positions 1, 4-6, 9-13 and 15 of SEQ ID NO: 826 are substituted by other amino acids;
[1585] (28β-4) a polypeptide comprising the amino acid sequence of XXXDXXREEXXXXRX (SEQ ID NO: 827), preferably a polypeptide comprising the amino acid sequence of XXXDXXREEEEXXRX (SEQ ID NO: 828), more preferably a polypeptide comprising an amino acid sequence in which any 1, 2, 3, 4, 5, 6, 7, 8, 9 or 10 of the amino acids at positions 1-3, 5, 6, 10-13 and 15 of SEQ ID NO: 829 are substituted by alanine, further preferably a polypeptide comprising an amino acid sequence in which any 1, 2, 3, 4, 5, 6, 7 or 8 of the amino acids at positions 1-3, 5, 6, 12, 13 and 15 of SEQ ID NO: 829 are substituted by other amino acids.

[1586] (29β) Epitope of glyceraldehyde-3-phosphate dehydrogenase isoform X1 (spot 29a, 30α, 31α, 32α, 33α)

[1587] In the present invention, the polypeptide (29β) can be any polypeptide selected from the group consisting of (29β-1) to (29β-2) as defined below:
[1588] (28β-1) a polypeptide comprising at least one amino acid sequence selected from the group consisting of SEQ ID NOs: 838 and 839;
[1589] (28β-2) a polypeptide comprising the amino acid sequence of XXXXXXXDKP (SEQ ID NO: 836), preferably a polypeptide comprising the amino acid sequence of XXXXXFXDKP (SEQ ID NO: 837), more preferably a polypeptide comprising an amino acid sequence in which any 1, 2, 3, 4, 5, 6 or 7 of the amino acids at positions 1-7 of SEQ ID NO: 838 are substituted by alanine, further preferably a polypeptide comprising an amino acid sequence in which any 1, 2, 3, 4, 5 or 6 of the amino acids at positions 1-5 and 7 of SEQ ID NO: 838 are substituted by other amino acids.

[1590] (34β) Epitope of bifunctional UDP-glucose 4-epimerase and UDP-xylose 4-epimerase 1-like (spot 34α)

[1591] In the present invention, the polypeptide (34β) can be any polypeptide selected from the group consisting of (34β-1) to (34β-2) as defined below:
[1592] (34β-1) a polypeptide comprising at least one amino acid sequence selected from the group consisting of SEQ ID NOs: 842 and 843-846;
[1593] (34β-2) a polypeptide comprising the amino acid sequence of XXXXXXXXXXXDDXE (SEQ ID NO: 840), preferably a polypeptide comprising the amino acid sequence of LXXXXXXX XXXDDXE (SEQ ID NO: 841), more preferably a polypeptide comprising an amino acid sequence in which any 1, 2, 3, 4, 5, 6, 7, 8, 9, 10, 11 or 12 of the amino acids at positions 1-11 and 14 of SEQ ID NO: 842 are substituted by alanine, further preferably a polypeptide comprising an amino acid sequence in which any 1, 2, 3, 4, 5, 6, 7, 8, 9, 10 or 11 of the amino acids at positions 2-11 and 14 of SEQ ID NO: 842 are substituted by other amino acids.

[1594] (35β) Epitope of elongation factor 1-alpha (spot 35α)

[1595] In the present invention, the polypeptide (35β) can be any polypeptide selected from the group consisting of (35β-1) to (35β-4) as defined below:
[1596] (35β-1) a polypeptide comprising at least one amino acid sequence selected from the group consisting of SEQ ID NOs: 849, 850, 853 and 856;
[1597] (35β-2) a polypeptide comprising the amino acid sequence of XXXXDKXXXERXXXE (SEQ ID NO: 847), preferably a polypeptide comprising the amino acid sequence of XXXXDKRVXERXXXE (SEQ ID NO: 848), more preferably a polypeptide comprising an amino acid sequence in which any 1, 2, 3, 4, 5, 6, 7, 8, 9 or 10 of the amino acids at positions 1-4, 7-9 and 12-14 of SEQ ID NO: 849 are substituted by alanine, further preferably a polypeptide comprising an amino acid sequence in which any 1, 2, 3, 4, 5, 6, 7 or 8 of the amino acids at positions 1-4, 9 and 12-14 of SEQ ID NO: 849 are substituted by other amino acids;
[1598] (35β-3) a polypeptide comprising the amino acid sequence of PISXFEXXX (SEQ ID NO: 851), preferably a polypeptide comprising the amino acid sequence of PISGFEXXX (SEQ ID NO: 852), more preferably a polypeptide comprising an amino acid sequence in which any 1, 2, 3, 4 or 5 of the amino acids at positions 4 and 7-9 of SEQ ID NO: 853 are substituted by alanine, further preferably a polypeptide comprising an amino acid sequence in which any 1, 2 or 3 of the amino acids at positions 7-9 of SEQ ID NO: 853 are substituted by other amino acids;
[1599] (35(-4) a polypeptide comprising the amino acid sequence of XXEXLDXXXX (SEQ ID NO: 854), preferably a polypeptide comprising the amino acid sequence of LLEXLDXXXX (SEQ ID NO: 855), more preferably a polypeptide comprising an amino acid sequence in which any 1, 2, 3, 4, 5, 6 or 7 of the amino acids at positions 1, 2, 4 and 7-10 of SEQ ID NO: 856 are substituted by alanine, further preferably a polypeptide comprising an amino acid sequence in which any 1, 2, 3, 4 or 5 of the amino acids at positions 4 and 7-10 of SEQ ID NO: 856 are substituted by other amino acids.

[1600] (36β) Epitope of Seed Maturation Protein PM34 (Spot 36α, 37α)

[1601] In the present invention, the polypeptide (36β) can be any polypeptide selected from the group consisting of (36β-1) to (36β-2) as defined below:
[1602] (36B-1) a polypeptide comprising at least one amino acid sequence selected from the group consisting of SEQ ID NOs: 857, 858 and 861;
[1603] (36B-2) a polypeptide comprising the amino acid sequence of KXXXXQQQ (SEQ ID NO: 859), preferably a polypeptide comprising the amino acid sequence of KXXXQQQQ (SEQ ID NO: 860), more preferably a polypeptide comprising an amino acid sequence in which any 1, 2, 3 or 4 of the amino acids at positions 2-5 of SEQ ID NO: 861 are substituted by alanine, further preferably a polypeptide comprising an amino acid sequence in which any 1, 2 or 3 of the amino acids at positions 2-4 of SEQ ID NO: 861 are substituted by other amino acids.

[1604] (38β) Epitope of Seed Biotin-Containing Protein SBP65-Like Isoform X1 (Spot 38α)

[1605] In the present invention, the polypeptide (38β) can be any polypeptide selected from the group consisting of (38β-1) to (38β-β) as defined below:
[1606] (38β-1) a polypeptide comprising at least one amino acid sequence selected from the group consisting of SEQ ID NOs: 864, 867, 869, 871, 874, 877, 880, 882, 884, 887, 889 and 892;
[1607] (38β-2) a polypeptide comprising the amino acid sequence of RGKXXXX (SEQ ID NO: 862), preferably a polypeptide comprising an amino acid sequence in which any 1, 2, 3 or 4 of the amino acids at positions 4-7 of SEQ ID NO: 864 are substituted by alanine, further preferably a polypeptide comprising an amino acid sequence in which any 1, 2, 3 or 4 of the amino acids at positions 4-7 of SEQ ID NO: 864 are substituted by other amino acids;
[1608] (38β-3) a polypeptide comprising the amino acid sequence of XRGKXXXXXX (SEQ ID NO: 865), preferably a polypeptide comprising the amino acid sequence of RRGKXXX XXX (SEQ ID NO: 866), more preferably a polypeptide comprising an amino acid sequence in which any 1, 2, 3, 4, 5, 6 or 7 of the amino acids at positions 1 and 5-10 of SEQ ID NO: 867 are substituted by alanine, further preferably a polypeptide comprising an amino acid sequence in which any 1, 2, 3, 4, 5 or 6 of the amino acids at positions 5-10 of SEQ ID NO: 867 are substituted by other amino acids;
[1609] (38β-4) a polypeptide comprising the amino acid sequence of RXKXXXXXXXXXXXE (SEQ ID NO: 868), preferably a polypeptide comprising an amino acid sequence in which any 1, 2, 3, 4, 5, 6, 7, 8, 9, 10, 11 or 12 of the amino acids at positions 2 and 4-14 of SEQ ID NO: 869 are substituted by alanine, further preferably a polypeptide comprising an amino acid sequence in which any 1, 2, 3, 4, 5, 6, 7, 8, 9, 10, 11 or 12 of the amino acids at positions 2 and 4-14 of SEQ ID NO: 869 are substituted by other amino acids; (30-5) a polypeptide comprising the amino acid sequence of XXXXXXXRRXXXXXR (SEQ ID NO: 870), preferably a polypeptide comprising an amino acid sequence in which any 1, 2, 3, 4, 5, 6, 7, 8, 9, 10, 11 or 12 of the amino acids at positions 1-7 and 10-14 of SEQ ID NO: 871 are substituted by alanine, further preferably a polypeptide comprising an amino acid sequence in which any 1, 2, 3, 4, 5, 6, 7, 8, 9, 10, 11 or 12 of the amino acids at positions 1-7 and 10-14 of SEQ ID NO: 871 are substituted by other amino acids;
[1610] (38β-6) a polypeptide comprising the amino acid sequence of XXXKGRVVXEXXXXX (SEQ ID NO: 872), preferably a polypeptide comprising the amino acid sequence of LPDKGRVVXESEKKE (SEQ ID NO: 873), more preferably a polypeptide comprising an amino acid sequence in which any 1, 2, 3, 4, 5, 6, 7, 8 or 9 of the amino acids at positions 1-3, 9 and 11-15 of SEQ ID NO: 874 are substituted by alanine, further preferably a polypeptide comprising an amino acid sequence in which any 1, 2, 3, 4, 5, 6, 7, 8 or 9 of the amino acids at positions 1-3, 9 and 11-15 of SEQ ID NO: 874 are substituted by other amino acids;
[1611] (38β-7) a polypeptide comprising the amino acid sequence of ATKAKDXXREXXXXX (SEQ ID NO: 875), preferably a polypeptide comprising the amino acid sequence of ATKAKDVTREXXXXX (SEQ ID NO: 876), more preferably a polypeptide comprising an amino acid sequence in which any 1, 2, 3, 4, 5, 6 or 7 of the amino acids at positions 7, 8 and 11-15 of SEQ ID NO: 877 are substituted by alanine, further preferably a polypeptide comprising an amino acid sequence in which any 1, 2, 3, 4 or 5 of the amino acids at positions 11-15 of SEQ ID NO: 877 are substituted by other amino acids;
[1612] (38β-8) a polypeptide comprising the amino acid sequence of XGXKGQXKKXXXXXX (SEQ ID NO: 878), preferably a polypeptide comprising the amino acid sequence of XGXKGQTKKXXGEEQ (SEQ ID NO: 879), more preferably a polypeptide comprising an amino acid sequence in which any 1, 2, 3, 4, 5, 6, 7, 8 or 9 of the amino acids at positions 1, 3, 7 and 10-15 of SEQ ID NO: 880 are substituted by alanine, further preferably a polypeptide comprising an amino acid sequence in which any 1, 2, 3 or 4 of the amino acids at positions 1, 3, 10 and 11 of SEQ ID NO: 880 are substituted by other amino acids;
[1613] (38β-9) a polypeptide comprising the amino acid sequence of RXXXETKEGX (SEQ ID NO: 881), preferably a polypeptide comprising an amino acid sequence in which any 1, 2, 3 or 4 of the amino acids at positions 2-4 and 10 of SEQ ID NO: 882 are substituted by alanine, further preferably a polypeptide comprising an amino acid sequence in which any 1, 2, 3 or 4 of the amino acids at positions 2-4 and 10 of SEQ ID NO: 882 are substituted by other amino acids;
[1614] (38β-10) a polypeptide comprising the amino acid sequence of XXXXNKQSSL (SEQ ID NO: 883), preferably a polypeptide comprising an amino acid sequence in which any 1, 2, 3 or 4 of the amino acids at positions 1-4 of SEQ ID NO: 884 are substituted by alanine, further preferably a polypeptide comprising an amino acid sequence in which any 1, 2, 3 or 4 of the amino acids at positions 1-4 of SEQ ID NO: 884 are substituted by other amino acids;
[1615] (38β-11) a polypeptide comprising the amino acid sequence of XKXVAXXXXXXXXXEX (SEQ ID NO: 885), preferably a polypeptide comprising the amino acid sequence of XKXVAEXXXQXASEL (SEQ ID NO: 886), more preferably a polypeptide comprising an amino acid sequence in which any 1, 2, 3, 4, 5, 6, 7, 8, 9, 10 or 11 of the amino acids at positions 1, 3, 6-13 and 15 of SEQ ID NO: 887 are substituted by alanine, further preferably a polypeptide comprising an amino acid sequence in which any 1, 2, 3, 4, 5 or 6 of the amino acids at positions 1, 3, 7-9 and 11 of SEQ ID NO: 887 are substituted by other amino acids; (38β-12) a polypeptide comprising the amino acid sequence of XXKVEAEXXX (SEQ ID NO: 888), preferably a polypeptide comprising an amino acid sequence in which any 1, 2, 3, 4 or 5 of the amino acids at positions 1, 2 and 8-10 of SEQ ID NO: 889 are substituted by alanine, further preferably a polypeptide comprising an amino acid sequence in which any 1, 2, 3, 4 or 5 of the amino acids at positions 1, 2 and 8-10 of SEQ ID NO: 889 are substituted by other amino acids;
[1616] (38β-β) a polypeptide comprising the amino acid sequence of XXXXIAEIAE (SEQ ID NO: 890), preferably a polypeptide comprising the amino acid sequence of XXETIAEIAE (SEQ ID NO: 891), more preferably a polypeptide comprising an amino acid sequence in which any 1, 2, 3 or 4 of the amino acids at positions 1-4 of SEQ ID NO: 892 are substituted by alanine, further preferably a polypeptide comprising an amino acid sequence in which any 1 or 2 of the amino acids at positions 1 and 2 of SEQ ID NO: 892 are substituted by other amino acids.

[1617] (39β) Epitope of ATP Synthase Subunit O, Mitochondrial-Like (Spot 39α)

[1618] In the present invention, the polypeptide (39β) can be any polypeptide selected from the group consisting of (39β-1) to (39β-2) as defined below:
[1619] (39β-1) a polypeptide comprising the amino acid sequence of SEQ ID NOs: 895;
[1620] (39β-2) a polypeptide comprising the amino acid sequence of XYXXSXKXXXXEKVX (SEQ ID NO: 893), preferably a polypeptide comprising the amino acid sequence of XYIXSXKXXXXEKVX (SEQ ID NO: 894), more preferably a polypeptide comprising an amino acid sequence in which any 1, 2, 3, 4, 5, 6, 7, 8 or 9 of the amino acids at positions 1, 3, 4, 6, 8-11 and 15 of SEQ ID NO: 895 are substituted by alanine, further preferably a polypeptide comprising an amino acid sequence in which any 1, 2, 3, 4, 5, 6, 7 or 8 of the amino acids at positions 1, 4, 6, 8-11 and 15 of SEQ ID NO: 895 are substituted by other amino acids.

[1621] (40β) Epitope of P24 Oleosin Isoform A (Spot 40α, 56α)

[1622] In the present invention, the polypeptide (40β) can be any polypeptide selected from the group consisting of (40β-1) to (40β-3) as defined below:
[1623] (40β-1) a polypeptide comprising at least one amino acid sequence selected from the group consisting of SEQ ID NOs: 898, 899 and 902;
[1624] (40β-2) a polypeptide comprising the amino acid sequence of YEXGV (SEQ ID NO: 896), preferably a polypeptide comprising the amino acid sequence of YEXGV (SEQ ID NO: 897), more preferably a polypeptide comprising an amino acid sequence in which any 1 or 2 of the amino acids at positions 3 and 6 of SEQ ID NO: 898 are substituted by alanine, further preferably a polypeptide comprising an amino acid sequence in which any 1 or 2 of the amino acids at positions 3 and 6 of SEQ ID NO: 898 are substituted by other amino acids;
[1625] (40β-3) a polypeptide comprising the amino acid sequence of XXXXXVTAX (SEQ ID NO: 900), preferably a polypeptide comprising the amino acid sequence of VXXXXVTAX (SEQ ID NO: 901), more preferably a polypeptide comprising an amino acid sequence in which any 1, 2, 3, 4, 5 or 6 of the amino acids at positions 1-5 and 9 of SEQ ID NO: 902 are substituted by alanine, further preferably a polypeptide comprising an amino acid sequence in which any 1, 2, 3, 4 or 5 of the amino acids at positions 2-5 and 9 of SEQ ID NO: 902 are substituted by other amino acids.

[1626] (41β) Epitope of Uncharacterized Protein At3g49720-Like Isoform X2 (Spot 41α)

[1627] In the present invention, the polypeptide (41β) can be a polypeptide comprising the amino acid sequence of SEQ ID NO: 903.

[1628] (42β) Epitope of Superoxide Dismutase [Mn], Mitochondrial (Spot 42α, 43α)

[1629] In the present invention, the polypeptide (42β) can be any polypeptide selected from the group consisting of (42β-1) to (4213-2) as defined below:
[1630] (42β-1) a polypeptide comprising the amino acid of SEQ ID NOs: 906;
[1631] (42β-2) a polypeptide comprising the amino acid sequence of XXWXXXXXXXEKEXX (SEQ ID NO: 904), preferably a polypeptide comprising the amino acid sequence of XXWXXXXEXXEKESX (SEQ ID NO: 905), more preferably a polypeptide comprising an amino acid sequence in which any 1, 2, 3, 4, 5, 6, 7, 8, 9, 10 or 11 of the amino acids at positions 1, 2, 4-10, 14 and 15 of SEQ ID NO: 906 are substituted by alanine, further preferably a polypeptide comprising an amino acid sequence in which any 1, 2, 3, 4, 5, 6, 7, 8 or 9 of the amino acids at positions 1, 2, 4-7, 9, 10 and 15 of SEQ ID NO: 906 are substituted by other amino acids.

[1632] (44β) Epitope of Ferritin-2 (Spot 44α)

[1633] In the present invention, the polypeptide (44β) can be any polypeptide selected from the group consisting of (44β-1) to (44β-2) as defined below:
[1634] (44β-1) a polypeptide comprising the amino acid of SEQ ID NOs: 909;
[1635] (44β-2) a polypeptide comprising the amino acid sequence of XXXXEEEREHAXQLI (SEQ ID NO: 907), preferably a polypeptide comprising an amino acid sequence in which any 1, 2, 3, 4 or 5 of the amino acids at positions 1-4 and 12 of SEQ ID NO: 909 are substituted by alanine, more preferably a polypeptide comprising an amino acid sequence in which any 1, 2, 3, 4 or 5 of the amino acids at positions 1-4 and 12 of SEQ ID NO: 909 are substituted by other amino acids.

[1636] In one mode, the polypeptide (44β) may not comprise the full-length amino acid sequence (SEQ ID NO: 14) of Ferritin-2 or a variant or a homolog having 100% or at least 90%, at least 80% or at least 70% identity to the total length of this amino acid sequence.

[1637] SEQ ID NO: 909 corresponds to amino acids 131-145 of SEQ ID NO: 14.

[1638] (45β) Epitope of Uncharacterized Protein LOC100499771 (Spot 45α)

[1639] In the present invention, the polypeptide (45β) can be a polypeptide comprising at least one amino acid sequence selected from the group consisting of SEQ ID NOs: 910-912.

[1640] (46β) Epitope of Seed Maturation Protein PM22 (Spot 46α)

[1641] In the present invention, the polypeptide (46β) can be any polypeptide selected from the group consisting of (46β-1) to (46β-2) as defined below:
[1642] (46β-1) a polypeptide comprising the amino acid of SEQ ID NOs: 915;
[1643] (46p-2) a polypeptide comprising the amino acid sequence of XDXDXXXDX (SEQ ID NO: 9β), preferably a polypeptide comprising the amino acid sequence of XDIDXXXDX (SEQ ID NO: 914), more preferably a polypeptide comprising an amino acid sequence in which any 1, 2, 3, 4, 5 or 6 of the amino acids at positions 1, 3, 5-7 and 9 of SEQ ID NO: 915 are substituted by alanine, further preferably a polypeptide comprising an amino acid sequence in which any 1, 2, 3 or 4 of the amino acids at positions 1 and 5-7 of SEQ ID NO: 915 are substituted by other amino acids.

[1644] (47β) Epitope of Eukaryotic Translation Initiation Factor 5A-2 (Spot 47α)

[1645] In the present invention, the polypeptide (47β) can be a polypeptide comprising at least one amino acid sequence selected from the group consisting of SEQ ID NOs: 916-918.

[1646] (48β) Epitope of Uncharacterized Protein LOC100306570 (Spot 48α)

[1647] In the present invention, the polypeptide (48β) can be any polypeptide selected from the group consisting of (48β-1) to (48β-2) as defined below:
[1648] (48β-1) a polypeptide comprising at least one amino acid sequence selected from the group consisting of SEQ ID NOs: 921 and 922;
[1649] (48β-2) a polypeptide comprising the amino acid sequence of XXXXXXFDK (SEQ ID NO: 919), preferably a polypeptide comprising the amino acid sequence of XXXXPXFDK (SEQ ID NO: 920), more preferably a polypeptide comprising an amino acid sequence in which any 1, 2, 3, 4, 5 or 6 of the amino acids at positions 1-6 of SEQ ID NO: 921 are substituted by alanine, further preferably a polypeptide comprising an amino acid sequence in which any 1, 2, 3, 4 or 5 of the amino acids at positions 1-4 and 6 of SEQ ID NO: 921 are substituted by other amino acids.

[1650] (49β) Epitope of Bowman-Birk Type Proteinase Inhibitor D-II (Spot 49α)

[1651] In the present invention, the polypeptide (49β) can be a polypeptide comprising the amino acid sequence of SEQ ID NO: 923.

[1652] In one mode, the polypeptide (49β) may not comprise the full-length amino acid sequence (SEQ ID NO: 2) of Bowman-Birk type proteinase inhibitor D-II or a variant or a homolog having 100% or at least 90%, at least 80% or at least 70% identity to the total length of this amino acid sequence.

[1653] SEQ ID NO: 923 corresponds to amino acids 79-83 of SEQ ID NO: 2.

[1654] (50β) Epitope of Uncharacterized Protein LOC100813859 (Spot 50α)

[1655] In the present invention, the polypeptide (50β) can be any polypeptide selected from the group consisting of (50β-1) to (50β-2) as defined below:
[1656] (50β-1) a polypeptide comprising at least one amino acid sequence selected from the group consisting of SEQ ID NOs: 924 and 927;
[1657] (50β-2) a polypeptide comprising the amino acid sequence of XXXXKQXXX (SEQ ID NO: 925), preferably a polypeptide comprising the amino acid sequence of XXDXKQXXX (SEQ ID NO: 926), more preferably a polypeptide comprising an amino acid sequence in which any 1, 2, 3, 4, 5, 6 or 7 of the amino acids at positions 1-4 and 7-9 of SEQ ID NO: 927 are substituted by alanine, further preferably a polypeptide comprising an amino acid sequence in which any 1, 2, 3, 4, 5 or 6 of the amino acids at positions 1, 2, 4 and 7-9 of SEQ ID NO: 927 are substituted by other amino acids.

[1658] (51β) Epitope of 14-3-3-Like Protein (Spot 51α)

[1659] In the present invention, the polypeptide (51β) can be a polypeptide comprising at least one amino acid sequence selected from the group consisting of SEQ ID NOs: 928-930.

[1660] (52β) Epitope of Probable Fructokinase-4 (Spot 52α)

[1661] In the present invention, the polypeptide (52β) comprising an epitope can be any polypeptide selected from the group consisting of (52β-1) and (52β-2) as defined below:
[1662] (52β-1) a polypeptide comprising at least one amino acid sequence selected from the group consisting of SEQ ID NOs: 933 and 934-938; and
[1663] (52β-2) a polypeptide comprising the amino acid sequence of XXXXXXSXXEXLXXX (SEQ ID NO: 931), preferably a polypeptide comprising the amino acid sequence of XXGXXXSXXEXLXXX (SEQ ID NO: 932), more preferably a polypeptide comprising an amino acid sequence in which any 1, 2, 3, 4, 5, 6, 7, 8, 9, 10, 11 or 12 of the amino acids at positions 1-6, 8, 9, 11, and 13-15 of SEQ ID NO: 933 are substituted by alanine, further preferably a polypeptide comprising an amino acid sequence in which any 1, 2, 3, 4, 5, 6, 7, 8, 9, 10 or 11 of the amino acids at positions 1, 2, 4-6, 8, 9, 11, and 13-15 of SEQ ID NO: 933 are substituted by other amino acids.

[1664] (53β) Epitope of Triosephosphate Isomerase Isoform X1 (Spot 53α)

[1665] In the present invention, the polypeptide (53β) can be a polypeptide comprising the amino acid sequence of SEQ ID NO: 939.

[1666] (54β) Epitope of Superoxide Dismutase [Fe], Chloroplastic Isoform X1 (Spot 54α)

[1667] In the present invention, the polypeptide (54β) can be any polypeptide selected from the group consisting of (54(34) to (54β-2) as defined below:
[1668] (54β-1) a polypeptide comprising at least one amino acid sequence selected from the group consisting of SEQ ID NOs: 940 and 943;
[1669] (54β-2) a polypeptide comprising the amino acid sequence of KXXXXTX (SEQ ID NO: 941), preferably a polypeptide comprising the amino acid sequence of KXXXXTQ (SEQ ID NO: 942), more preferably a polypeptide comprising an amino acid sequence in which any 1, 2, 3, 4 or 5 of the amino acids at positions 2-5 and 7 of SEQ ID NO: 943 are substituted by alanine, further preferably a polypeptide comprising an amino acid sequence in which any 1, 2, 3 or 4 of the amino acids at positions 2-5 of SEQ ID NO: 943 are substituted by other amino acids.

[1670] (55β) Epitope of 51 kDa Seed Maturation Protein Precursor (Spot 55α)

[1671] In the present invention, the polypeptide (55β) can be any polypeptide selected from the group consisting of (55β-1) to (5513-4) as defined below:
[1672] (55β-1) a polypeptide comprising at least one amino acid sequence selected from the group consisting of SEQ ID NOs: 946, 949 and 952;
[1673] (55β-2) a polypeptide comprising the amino acid sequence of TKXXXSDXX (SEQ ID NO: 944), preferably a polypeptide comprising the amino acid sequence of TKDXXSDXX (SEQ ID NO: 945), more preferably a polypeptide comprising an amino acid sequence in which any 1, 2, 3, 4 or 5 of the amino acids at positions 3-5, 8 and 9 of SEQ ID NO: 946 are substituted by alanine, further preferably a polypeptide comprising an amino acid sequence in which any 1, 2, 3 or 4 of the amino acids at positions 4, 5, 8 and 9 of SEQ ID NO: 946 are substituted by other amino acids;
[1674] (55β-3) a polypeptide comprising the amino acid sequence of VKDXXXDA (SEQ ID NO: 947), preferably a polypeptide comprising the amino acid sequence of VKDYXXDA (SEQ ID NO: 948), more preferably a polypeptide comprising an amino acid sequence in which any 1, 2 or 3 of the amino acids at positions 4-6 of SEQ ID NO: 949 are substituted by alanine, further preferably a polypeptide comprising an amino acid sequence in which any 1 or 2 of the amino acids at positions 5 and 6 of SEQ ID NO: 949 are substituted by other amino acids;
[1675] (55β-4) a polypeptide comprising the amino acid sequence of KDXXXXXXQ (SEQ ID NO: 950), preferably a polypeptide comprising the amino acid sequence of KDXXXXXAQ (SEQ ID NO: 951), more preferably a polypeptide comprising an amino acid sequence in which any 1, 2, 3, 4, 5 or 6 of the amino acids at positions 3-8 of SEQ ID NO: 952 are substituted by alanine, further preferably a polypeptide comprising an amino acid sequence in which any 1, 2, 3, 4 or 5 of the amino acids at positions 3-7 of SEQ ID NO: 952 are substituted by other amino acids.

[1676] (57β) Epitope of Gly m 4

[1677] In the present invention, the polypeptide (57β) can be any polypeptide selected from the group consisting of (56β-1) to (56β-2) as defined below:
[1678] (57β-1) a polypeptide comprising the amino acid of SEQ ID NOs: 955;
[1679] (57β-2) a polypeptide comprising the amino acid sequence of XXXXXXXEXYXLXHP (SEQ ID NO: 953), preferably a polypeptide comprising the amino acid sequence of XXXXXXIEAYLLAHP (SEQ ID NO: 954), more preferably a polypeptide comprising an amino acid sequence in which any 1, 2, 3, 4, 5, 6, 7, 8, 9 or 10 of the amino acids at positions 1-7, 9, 11 and 13 of SEQ ID NO: 955 are substituted by alanine, further preferably a polypeptide comprising an amino acid sequence in which any 1, 2, 3, 4, 5 or 6 of the amino acids at positions 1-6 of SEQ ID NO: 955 are substituted by other amino acids.

[1680] In one mode, the polypeptide (57β) may not comprise the full-length amino acid sequence (UniProt accession number: P26987.1) of Gly m 4 or a variant or a homolog having 100% or at least 90%, at least 80% or at least 70% identity to the total length of this amino acid sequence.

[1681] SEQ ID NO: 955 corresponds to amino acids 141-155 of UniProt accession number: P26987.1.

[1682] (58β) Epitopes of Gly m 5α and Gly m 5α′

[1683] In the present invention, the polypeptide (58β) can be a polypeptide comprising at least one amino acid sequence selected from the group consisting of SEQ ID NOs: 956-960.

[1684] In one mode, the polypeptide (58β) comprising an epitope may not comprise the full-length amino acid sequence (NCBI accession number: NP_001236856.1) of Gly m 5α or the full-length amino acid sequence (SEQ ID NO: NCBI accession number: NP_001237316.1) of Gly m 5α′, or a variant or a homolog having 100% or at least 90%, at least 80% or at least 70% identity to the total length of any of these amino acid sequences.

[1685] SEQ ID NOs: 956-960 correspond to amino acids 173-181 (SEQ ID NO: 956), amino acids 294-301 (SEQ ID NO: 957), amino acids 301-309 (SEQ ID NO: 958), amino acids 414-422 (SEQ ID NO: 959), and amino acids 294-301 (SEQ ID NO: 960), respectively, of NCBI accession number: NP 001236856.1.

[1686] (59β) Epitopes of Gly m 6.01 and Gly m 6.02

[1687] In the present invention, the polypeptide (59β) can be a polypeptide comprising at least one amino acid sequence selected from the group consisting of SEQ ID NOs: 961 and 962.

[1688] In one mode, the polypeptide (59β) may not comprise the full-length amino acid sequence (UniProt accession number: CAA33215.1) of Gly m 6.01 or the full-length amino acid sequence (UniProt accession number: BAA00154.1) of Gly m 6.02, or a variant or a homolog having 100% or at least 90%, at least 80% or at least 70% identity to the total length of any of these amino acid sequences.

[1689] SEQ ID NOs: 961 and 962 correspond to amino acids 201-215 and amino acids 451-465, respectively, of UniProt accession number: CAA33215.1.

[1690] (60β) Epitope of Gly m 8

[1691] In the present invention, the polypeptide (60β) can be a polypeptide comprising the amino acid sequence of SEQ ID NO: 963.

[1692] In one mode, the polypeptide (60β) may not comprise the full-length amino acid sequence (UniProt accession number: AAB71140.1) of Gly m 8 or a variant or a homolog having 100% or at least 90%, at least 80% or at least 70% identity to the total length of this amino acid sequence.

[1693] SEQ ID NO: 963 corresponds to amino acids 71-85 of UniProt accession number: AAB71140.1.

[1694] The residue of X as to the aforementioned polypeptides (1β) to (60β) is an amino acid residue at a site where binding activity against IgE antibodies from allergic patients was maintained even after substitution by alanine in alanine scanning described in Example 4. It is well known to those skilled in the art that even when such a site is substituted by any other amino acids, it is highly probable that this binding activity against IgE antibodies is maintained.

[1695] The lengths of the aforementioned polypeptides (1( )to (60β) are not particularly limited. In a preferred mode, the lengths of the aforementioned polypeptides (1β) to (60β) can be at least 500 amino acids, at least 300 amino acids, at least 200 amino acids, at least 100 amino acids, at least 50 amino acids, at least 30 amino acids, at least 20 amino acids, at least 10 amino acids, or at least 5 amino acids.

[1696] The aforementioned polypeptides (1 β) to (60β) may be prepared by a technique of chemical synthesis such as solid-phase peptide synthesis. Alternatively, polypeptides comprising an epitope may be obtained by expressing them as recombinant proteins using a genetic recombination technique well known to those skilled in the art and by separating and purifying them using protein purification methods well known to those skilled in the art.

[1697] Diagnosis Kit and Method (2)

[1698] The present invention provides a method for providing an indicator for diagnosing an allergy in a subject, the method comprising the steps of:

[1699] (i) contacting a sample obtained from the subject with an antigen, wherein the sample is a solution comprising an Ig antibody;

[1700] (ii) detecting binding between the IgE antibody present in the sample obtained from the subject and the antigen; and

[1701] (iii) when the binding between the IgE antibody in the subject and the antigen is detected, an indicator of the fact that the subject is allergic is provided;

wherein the antigen is at least one of the aforementioned polypeptides (1β) to (60β), or a polypeptide in which two or more of the aforementioned polypeptides (1β) to (60β) are joined together via or without a spacer.

[1702] Hereinafter, the at least one of the aforementioned polypeptides (1β) to (60β), or the polypeptide in which two or more of the aforementioned polypeptides (1β) to (60β) are joined together via or without a spacer is referred to as the “antigen including (1β) to (60β)” in the present specification. The type of the spacer is not particularly limited, and an ordinary spacer that is used by those skilled in the art for joining together two or more peptides can be used. The spacer may be, for example, a hydrocarbon chain such as Acp(6)-OH.

[1703] The sample obtained from a subject is as described above in the subsection titled “Diagnosis kit and method (1)”.

[1704] Detection of contact and binding between the sample obtained from a subject and the antigen can be carried out by using a known method described above in the subsection titled “Diagnosis kit and method (1)”, such as ELISA (Enzyme-Linked Immunosorbent Assay), sandwich immunoassay, immunoblotting, immunoprecipitation, or immunochromatography.

[1705] The antigen may be provided as an isolated antigen including (1β) to (60β) in a state immobilized on a carrier. In this case, the steps (i) and (ii) mentioned above can be carried out using ELISA or sandwich immunoassay, or the like. In this respect, the step (i) mentioned above can be carried out by contacting the sample obtained from a subject with an antigen-immobilized surface.

[1706] The antigen including (1β) to (60β) specifically binds to IgE antibodies from allergic patients. Therefore, when binding between an IgE antibody from a subject and the antigen is detected, an indicator of the fact that the subject is allergic to soybean is provided.

[1707] The present invention further provides a kit for diagnosing an allergy, comprising at least one antigen including (1β) to (60β). The diagnosis kit of this invention may be used in the aforementioned method for providing an indicator for diagnosing an allergy or in a diagnosis method as described later. The diagnosis kit of this invention may comprise not only the at least one antigen including (1β) to (60β), but also an anti-IgE antibody labeled with an enzyme and a chromogenic or luminescent substrate serving as a substrate for the enzyme. Also, a fluorescent-labeled anti-IgE antibody may be used. In the diagnosis kit of this invention, the antigen may be provided in a state immobilized on a carrier. The diagnosis kit of this invention may also be provided together with instructions on the procedure for diagnosis or a package containing said instructions.

[1708] The present invention further provides a composition for diagnosing an allergy, comprising at least one antigen including (1β) to (60β). The diagnosis composition of this invention can be used in a diagnosis method as described below. The diagnosis composition of this invention may further comprise a pharmaceutically acceptable carrier and/or additives commonly used with the antigen of this invention depending on the need.

[1709] In one mode, the present invention provides a method for diagnosing an allergy in a subject, the method comprising:
[1710] (i) contacting a sample obtained from the subject with an antigen;
[1711] (ii) detecting binding between an IgE antibody present in the sample obtained from the subject and the antigen; and
[1712] (iii) when the binding between the IgE antibody in the subject and the antigen is detected, diagnosing the subject as being allergic to a soybean;
   wherein the antigen is at least one of the aforementioned polypeptides (1β) to (60β), or a polypeptide in which two or more of the aforementioned polypeptides (1β) to (60β) are joined together via or without a spacer (i.e., the antigen including (1β) to (60β)). In this method, the steps (i) and (ii) are performed as described above regarding the corresponding steps of the method for providing an indicator for diagnosing an allergy.

[1713] In another mode, the present invention provides a method for diagnosing an allergy in a subject, the method comprising administering to the subject at least one antigen including (1β) to (60β). This method may be performed in the form of a skin test characterized by applying the antigen onto the skin. The skin test includes forms of tests described above in the subsection titled “Diagnosis kit and method (1)”. If a skin reaction such as swelling occurs in a skin portion to which the antigen has been applied, the subject of interest is diagnosed as having an allergy. The amount of the antigen to be applied to the skin in such tests can be, for example, not more than 100 μg per dose.

[1714] In yet another mode, the present invention provides at least one antigen including (1β) to (60β), intended for use as an active ingredient for a load test for allergy diagnosis.

[1715] In still another mode, the present invention provides at least one antigen including (1β) to (60β), intended for use in the diagnosis of an allergy.

[1716] In still another mode, the present invention provides use of at least one antigen including (1β) to (60β) for the production of a diagnostic agent for an allergy.

[1717] In this subsection, the allergy to be diagnosed or detected can be allergies to allergens in which allergen components having the aforementioned polypeptides (1β) to (60β) are present. Thus, detection of the allergy can be detection of not only an allergy to a single allergen, but also allergies including cross-reactivity.

[1718] Pharmaceutical Composition and Treatment Method (2)

[1719] The present invention provides a pharmaceutical composition comprising at least one antigen including (1β) to (60β). In one mode, the aforementioned pharmaceutical composition is used for the treatment of an allergy.

[1720] The present invention also provides a method for treating an allergy, the method comprising administering at least one antigen including (1β) to (60β) to a patient in need of a treatment for an allergy.

[1721] In another mode, the present invention provides at least one antigen including (1β) to (60β), intended for use in the treatment for an allergy. In yet another mode, the present invention provides use of at least one antigen including (1β) to (60β) for the production of a therapeutic agent for an allergy.

[1722] In still another mode, the at least one antigen including (1β) to (60β) can be used as an active ingredient for hyposensitization therapy for an allergy. Here, the antigen protein to be used in the hyposensitization therapy may be a polypeptide that has been expressed and purified and may be a polypeptide that has been expressed in food such as rice, such as rice-based vaccine expressing pollen allergens.

[1723] The administration route, administration dose, frequency and/or period of the pharmaceutical composition of this invention, and other ingredients to be contained in the pharmaceutical composition, and the dosage form can be as described above in the subsection titled “Pharmaceutical composition and treatment method (1)”. In the case of using the antigen including (1β) to (60β), for example, the dose to an adult patient may be a dose of not more than 100 μg per dose.

[1724] In this subsection, the allergy to be treated can be allergies to allergens in which allergen components having the aforementioned polypeptides (1β) to (60β) are present. Thus, detection of the allergy can be detection of not only an allergy to a single allergen, but also allergies including cross-reactivity.

[1725] Tester (2)

[1726] The present invention provides a tester comprising an antibody for at least one antigen including (1β) to (60β).

[1727] The antibody can be prepared by a conventional method. For example, the antibody may be prepared by immunizing a mammal such as rabbit with the aforementioned antigen including (1β) to (60β). The antibody may be an Ig antibody, a polyclonal antibody, a monoclonal antibody, or an antigen-binding fragment thereof (e.g., Fab, F(ab′)₂, Fab′).

[1728] Further, in the aforementioned tester, the antibody may be provided in a form bound to a carrier. The type of the carrier is not particularly limited as long as it is usable for detection of binding between an antibody and the antigen including (1β) to (60β). Any given carrier known to those skilled in the art can be used.

[1729] In one mode, the aforementioned tester can be used for the purposes described above in the subsection titled “Tester (1)”.

[1730] A method for determining the presence or absence of an antigen is as described above in the subsection titled “Tester (1)”.

[1731] Another mode of the present invention includes a tester for determining the presence or absence of an antigen of an allergy in an object of interest, the tester comprising a primer appropriate for an epitope. The primer is not limited and may be designed so as to comprise, for example, a portion of the nucleotide sequence of a nucleic acid encoding any of the amino acid sequences defined above in (1β) to (60β), or a complementary strand thereof. Alternatively, the primer may be designed so as to be the nucleotide sequence of a region upstream or downstream of a portion encoding an epitope that is any of the amino acid sequences defined above in (1β) to (60β), in a nucleic acid encoding a protein comprising the epitope, or a complementary strand thereof. Here, the position of the epitope in the full-length sequence of an antigen is as defined above in the subsections titled “Antigen” and “Epitope of antigen”. Particularly, when mRNA is of interest, the tester has a complementary primer of a poly-A tail.

[1732] For example, DNA is amplified by PCR (Polymerase Chain Reaction) including RT-PCR using templated DNA or mRNA obtained from a sample and the aforementioned primer, and the presence or absence of a nucleic acid encoding the amino acid sequences defined above in (1β) to (60β) in the sequence of the amplified DNA is determined to determine the presence or absence of the antigen. Amplification methods by PCR can be exemplified by RACE.

[1733] Allergen-Free Food and the Like (2)

[1734] The present invention provides a food raw material or an edible processed product in which at least one antigen including (1β) to (60β) is eliminated or reduced.

[1735] The method for eliminating or reducing the antigen of the present invention in a food raw material or an edible processed product is not limited. The techniques described above in the subsection titled “Allergen-free food and the like (1)” may be used.

[1736] Elimination or reduction of at least one antigen including (1β) to (60β) may be achieved by eliminating or reducing the whole antigen or may be achieved by cleaving or removing the polypeptides defined in (1β) to (60β) from the antigen protein. The “removal” includes deletion and modification.

[1737] The edible processed product in which the antigen of the present invention is eliminated or reduced may be a processed product of the food raw material in which the antigen of the present invention is eliminated or reduced, such as powdered milk obtained with purified amino acids as a raw material. In the case of using an ordinary food raw material, a treatment for removing or reducing the polypeptide of this invention is performed before or after preparation of an edible processed product. The techniques described in the subsection titled “Allergen-free food and the like (1)” may be used as methods for removing or reducing the antigen of the present invention in an edible processed product obtained with an ordinary food raw material.

[1738] Method for Producing Allergen-Free Food (2)

[1739] The present invention provides a method for producing an edible processed product in which an antigen is eliminated or reduced, the method comprising the step of confirming that the antigen is eliminated or reduced, in a production process of the processed product, wherein the antigen is at least one of the aforementioned antigen including (1β) to (60β) and antigens (1α) to (55α).

[1740] In the production method, elimination or reduction of an antigen means that at least one antigen including (1β) to (60β) is eliminated or reduced, or the polypeptides defined in (1β) to (60β) are cleaved or removed from the antigen protein.

[1741] A technique of confirming that the antigen is eliminated or reduced in the production process of the edible processed product is not particularly limited, and any technique capable of detecting at least one of the aforementioned antigen including (1β) to (60β) and antigens (1α) to (55α) may be used. For example, the presence or absence of the polypeptide or the antigen in the processed product may be confirmed from the binding activity of an antibody for at least one of the aforementioned antigen including (1β) to (60β) and antigens (1α) to (55α) against a sample containing a material resulting from the production process of the processed product. Details of such a method are as described above in the subsection titled “Diagnosis kit and method (1)”. Thus, in the production method, the “IgE antibody from a subject” described above in the subsection titled “Diagnosis kit and method (1)” is replaced with the “antibody for at least one of the aforementioned polypeptides (1β) to (60β) and antigens (1α) to (55α)”, and the “antigen” described above in the subsection titled “Diagnosis kit and method (1)” is replaced with the “sample containing a material resulting from the production process of the edible processed product”. The techniques described above in the subsection titled “Diagnosis kit and method (1)” can be used to confirm that the antigen is eliminated or reduced in the production process of the edible processed product.

### EXAMPLES

[1742] The following describes examples of the present invention. The technical scope of this invention is not limited by these examples.

### Example 1

### Confirmation of a Protein Pattern

[1743] Proteins contained in soybean were investigated using a two-dimensional electrophoresis method described below.

[1744] Protein Extraction

[1745] Commercially available dry soybeans (several beans) were powdered. 500 μl of water was added to 50 mg of the powder and shaking extraction was conducted using a vortex mixer at 25° C. for 10 minutes. After the shaking extraction, a liquid protein extract was collected.

[1746] Thereafter, the precipitation procedure was repeated twice using a 2D-CleanUP Kit (produced by GE). In the first round of precipitation, the collected liquid protein extract was precipitated by adding TCA (trichloroacetic acid) thereto and the precipitated product produced by this procedure (TCA-precipitated product) was collected. In the second round of precipitation, the TCA-precipitated product collected above was further precipitated by adding acetone thereto and the precipitated product (sample) produced by this procedure was collected.

[1747] Preparation of a Sample Solution

[1748] Part of the collected sample (50 μg on a protein weight basis) was dissolved in 150 μL of a DeStreak Rehydration Solution (produced by GE), which is a swelling buffer for first-dimensional isoelectric focusing gels, thereby obtaining a sample solution for first-dimensional isoelectric focusing (sample solution for swelling). The constituents of the DeStreak Rehydration Solution are as mentioned below.

[1749] 7M thiourea

[1750] 2M urea

[1751] 4% (w/v) of CHAPS (3-[(3-cholamidopropyl)dimethylammonio]propanesulfonate)

[1752] 0.5% (v/v) IPG buffer; produced by GE

[1753] Moderate amount of BPB (bromophenol blue)

[1754] Penetration of the Sample into First-Dimensional Isoelectric Focusing Gels

[1755] First-dimensional isoelectric focusing gel strips (Immobiline Drystrip IPG gels (pH3-10NL); produced by GE) were immersed in 140 μL of the foregoing sample solution for first-dimensional isoelectric focusing (sample solution for swelling) and impregnated with the solution at room temperature overnight.

[1756] In this example, an IPGphor electrophoresis system produced by GE was used.

[1757] An electrophoresis tray was filled with silicone oil. Filter paper moisten with water was positioned at both ends of the gel strips impregnated with the sample, and the gel strips were set in the electrophoresis tray such that the gel strips were covered with silicone oil. Electrodes were placed on the gel strips with the filter paper intervening therebetween.

[1758] The maximum current of the isoelectric focusing system was set to 75 μA per gel strip, and the first-dimensional isoelectric focusing was carried out according to the following voltage program: (1) a constant voltage step was performed at a constant voltage of 300 V until the volt-hours reached 750 Vhr (the current variation width during electrophoresis for 30 minutes before the end of this step was 5 μA); (2) the voltage was increased gradually to 1000 V for 300 Vhr; (3) the voltage was further increased gradually to 5000 V for 4500 Vhr; and then (4) the voltage was held at a constant voltage of 5000 V until the total Vhr reached 12000.

[1759] SDS Equilibration of Isoelectric Focusing Gels

[1760] After the aforementioned first-dimensional isoelectric focusing was done, the gel strips were taken out of the isoelectric focusing system, immersed in an equilibration buffer containing a reducing agent, and shaken at room temperature for 15 minutes. The constituents of the equilibration buffer containing the reducing agent are as mentioned below.

[1761] 100 mM Tris-HCl (pH 8.0)

[1762] 6M urea

[1763] 30% (v/v) glycerol

[1764] 2% (w/v) SDS

[1765] 1% (w/v) DTT

[1766] Next, the equilibration buffer containing the reducing agent was removed, and then the gel strips were immersed in an equilibration buffer containing an alkylating agent and shaken at room temperature for 15 minutes to obtain SDS-equilibrated gels. The constituents of the equilibration buffer containing the alkylating agent are as mentioned below.

[1767] 100 mM Tris-HCl (pH 8.0)

[1768] 6M urea

[1769] 30% (v/v) glycerol

[1770] 2% (w/v) SDS

[1771] 2.5% (w/v) iodoacetamide

[1772] Second-Dimensional SDS-PAGE

[1773] In this example, the XCell SureLock Mini-Cell electrophoresis system produced by Life Technologies was used. The second-dimensional electrophoresis gels used were NuPAGE 4-12% Bis-Tris Gels produced by Life Technologies. Also, an electrophoresis buffer composed of the following constituents was prepared and used.

[1774] 50 mM MOPS

[1775] 50 mM Tris base

[1776] 0.1% (w/v) SDS

[1777] 1 mM EDTA

[1778] Further, an agarose solution for gel adhesion was used in this example, which was prepared by dissolving 0.5% (w/v) Agarose S (produced by Nippon Gene Co., Ltd.) and a moderate amount of BPB (bromophenol blue) in the electrophoresis buffer.

[1779] SDS-PAGE wells were washed well with the electrophoresis buffer, and then the buffer used for the washing was removed. Next, the washed wells were charged with the fully dissolved agarose solution for gel adhesion. Next, the SDS-equilibrated gel strips were immersed in agarose and closely adhered to second-dimensional electrophoresis gels using tweezers. After it was confirmed that agarose was fully fixed with the gels being closely adhered to each other, electrophoresis was performed at a constant voltage of 200 V for about 45 minutes.

[1780] Fluorescent Staining of Gels

[1781] The gels were fluorescently stained with SYPRO Ruby (produced by Life Technologies).

[1782] First, an airtight container to be used was washed well in advance with 98% (v/v) ethanol. The electrophoresed second-dimensional electrophoresis gel strips were taken out of the SDS-PAGE system, placed onto the washed airtight container, and treated twice by immersion in 50% (v/v) methanol and 7% (v/v) aqueous solution containing acetic acid for 30 minutes. Then, a further immersion treatment was done for 10 minutes, with the solution being replaced by water. Next, the second-dimensional electrophoresis gel strips were immersed in 40 mL of SYPRO Ruby and shaken at room temperature overnight. Thereafter, the SYPRO Ruby was removed, and then the second-dimensional electrophoresis gel strips were washed with water and shaken in 10% (v/v) methanol and 7% (v/v) aqueous solution containing acetic acid for 30 minutes. Further shaking was done for at least 30 minutes, with the solution being replaced by water.

[1783] Analysis

[1784] The second-dimensional electrophoresis gels obtained through the foregoing series of treatments were subjected to fluorescent image scanning on Typhoon 9400 (produced by GE). The results of the two-dimensional electrophoresis are shown in FIG. 1. Molecular weight marker bands are found at the left of the panels. The positions of the bands denote particular molecular weights (in KDa).

### Example 2

### Identification of Antigens by Immunoblotting

[1785] Identification of antigens by immunoblotting was carried out by taking all the steps up to the step of “Second-dimensional SDS-PAGE” as described above in Example 1, followed by the steps of “Transfer to membrane”, “Immunoblotting” and “Analysis” as described below.

[1786] Transfer to Membrane

[1787] Transfer to membrane was done using the following transfer system and transfer buffer.
[1788] Transfer system: XCell SureLock Mini-Cell and XCell II Blot Module (produced by Life Technologies)
[1789] Transfer buffer: NuPAGE Transfer Buffer (X20) (produced by Life Technologies), used in a form diluted 20-fold with milliQ water.

[1790] To be specific, proteins in the two-dimensional electrophoresis gels were transferred to a membrane (PVDF membrane) according to the following procedure.

[1791] (1) The PVDF membrane was immersed in 100% methanol followed by milliQ water, and then moved into the transfer buffer to hydrophilize the PVDF membrane.

[1792] (2) After sponge, filter paper, the gels treated by second-dimensional SDS-PAGE, the hydrophilized PVDF membrane, filter paper, and sponge were put in place in this order, the transfer system was energized at a constant voltage of 30 V for one hour.

[1793] Immunoblotting

[1794] Immunoblotting of the membrane was carried out using, as a primary antibody, a serum sample from a patient with a soybean allergy or a serum sample from a healthy subject.

[1795] Immunoblotting of the membrane was carried out according to the following procedure.
[1796] (1) The transferred membrane was shaken in a 5% skim milk/PBST solution (a PBS buffer containing 0.3% Tween 20 nonionic surfactant) at room temperature for one hour.
[1797] (2) The membrane was left to stand in a solution of 3% primary antibody serum in 5% skim milk/PBST at room temperature for one hour.
[1798] (3) The membrane was washed with a PBST solution (5 min.×3 times).
[1799] (4) The membrane was left to stand in a 1:2500 dilution of the secondary antibody, anti-human IgE-HRP (horseradish peroxidase), with a 3% skim milk/PBST solution at room temperature for one hour.
[1800] (5) The membrane was washed with a PBST solution (5 min.×3 times).
[1801] (6) The membrane was left to stand in Pierce Western Blotting Substrate Plus (produced by Thermo Fisher Scientific) for 5 minutes.

[1802] Analysis

[1803] The membrane obtained through the foregoing series of treatments was subjected to fluorescent image scanning on Typhoon 9400 (produced by GE).

[1804] The immunoblots obtained with the serum from the soybean-allergic patient were compared with those obtained with the control serum from the healthy subject. By immunoblotting using the serum from soybean-allergic Patient 1α, Patient 2α, Patient 3α, Patient 4α, Patient 5α, Patient 6α, Patient 7α, Patient 8α, and Patient 9α, 56 spots were detected (FIGS. 3A to I), which are different from the spots detected when the serum of the healthy subject was used (FIG. 2) and different from those of the known soybean allergen proteins.

[1805] The molecular weights and isoelectric points of the 56 spots are as follows.
[1806] Spot 1α: Molecular weight 80 to 110 kDa, pI 3.0 to 6.0
[1807] Spot 2α: Molecular weight 60 to 110 kDa, pI 3.0 to 6.0
[1808] Spot 3α: Molecular weight 100 to 150 kDa, pI 4.0 to 6.0
[1809] Spot 4α: Molecular weight 80 to 110 kDa, pI 4.0 to 7.0
[1810] Spot 5α: Molecular weight 80 to 160 kDa, pI 4.0 to 7.0
[1811] Spot 6α: Molecular weight 80 to 110 kDa, pI 4.0 to 7.0
[1812] Spot 7α: Molecular weight 60 to 110 kDa, pI 4.0 to 7.0
[1813] Spot 8α: Molecular weight 60 to 110 kDa, pI 4.0 to 8.0
[1814] Spot 9α: Molecular weight 60 to 110 kDa, pI 4.0 to 8.0
[1815] Spot 10α: Molecular weight 40 to 80 kDa, pI 4.0 to 7.0
[1816] Spot 11α: Molecular weight 40 to 80 kDa, pI 4.0 to 8.0
[1817] Spot 12α: Molecular weight 40 to 80 kDa, pI 4.0 to 8.0
[1818] Spot 13α: Molecular weight 40 to 80 kDa, pI 4.0 to 7.0
[1819] Spot 14α: Molecular weight 40 to 80 kDa, pI 3.0 to 6.0
[1820] Spot 15α, 16α: Molecular weight 30 to 80 kDa, pI 4.0 to 7.0
[1821] Spot 17α: Molecular weight 30 to 80 kDa, pI 4.0 to 7.0
[1822] Spot 18α: Molecular weight 40 to 80 kDa, pI 4.0 to 8.0
[1823] Spot 19α: Molecular weight 40 to 80 kDa, pI 4.0 to 8.0
[1824] Spot 20α: Molecular weight 60 to 75 kDa, pI 6.0 to 8.0
[1825] Spot 21α: Molecular weight 40 to 60 kDa, pI 5.0 to 8.0
[1826] Spot 22α: Molecular weight 25 to 37 kDa, pI 8.0 to 10.0
[1827] Spot 23α: Molecular weight 25 to 37 kDa, pI 7.0 to 9.0
[1828] Spot 24α: Molecular weight 5 to 20 kDa, pI 5.0 to 7.0
[1829] Spot 25α: Molecular weight 30 to 80 kDa, pI 4.0 to 7.0
[1830] Spot 26α: Molecular weight 30 to 80 kDa, pI 4.0 to 7.0
[1831] Spot 27α: Molecular weight 30 to 80 kDa, pI 4.0 to 7.0
[1832] Spot 28α: Molecular weight 20 to 60 kDa, pI 4.0 to 7.0
[1833] Spot 29α, 30α, 31α, 32α, 33α: Molecular weight 20 to 60 kDa, pI 4.0 to 8.0
[1834] Spot 34α: Molecular weight 20 to 60 kDa, pI 6.0 to 10.0
[1835] Spot 35α: Molecular weight 30 to 80 kDa, pI 6.0 to 10.0
[1836] Spot 36α, 37α: Molecular weight 20 to 60 kDa, pI 4.0 to 8.0
[1837] Spot 38α: Molecular weight 80 to 160 kDa, pI 6.0 to 10.0
[1838] Spot 39α: Molecular weight 10 to 50 kDa, p16.0 to 10.0
[1839] Spot 40α, 56α: Molecular weight 10 to 50 kDa, pI 6.0 to 10.0
[1840] Spot 41α: Molecular weight 10 to 50 kDa, pI 6.0 to 10.0
[1841] Spot 42α, 43α: Molecular weight 10 to 50 kDa, pI 6.0 to 10.0
[1842] Spot 44α: Molecular weight 10 to 50 kDa, p14.0 to 7.0
[1843] Spot 45α: Molecular weight 5 to 40 kDa, pI 4.0 to 7.0
[1844] Spot 46α: Molecular weight 5 to 40 kDa, pI 4.0 to 7.0
[1845] Spot 47α: Molecular weight 5 to 40 kDa, pI 4.0 to 7.0
[1846] Spot 48α: Molecular weight 5 to 40 kDa, pI 4.0 to 8.0
[1847] Spot 49α: Molecular weight 5 to 20 kDa, pI 4.0 to 7.0
[1848] Spot 50α: Molecular weight 5 to 40 kDa, pI 3.0 to 6.0
[1849] Spot 51α: Molecular weight 10 to 50 kDa, pI 3.0 to 6.0
[1850] Spot 52α: Molecular weight 20 to 60 kDa, pI 4.0 to 7.0
[1851] Spot 53α: Molecular weight 10 to 50 kDa, pI 4.0 to 8.0
[1852] Spot 54α: Molecular weight 10 to 50 kDa, pI 4.0 to 8.0
[1853] Spot 55α: Molecular weight 40 to 80 kDa, pI 6.0 to 10.0

### Example 3

### Mass Spectrometry and Identification of Antigens

[1854] The amino acid sequences of the antigens that form the 56 protein spots were identified by mass spectroscopy.

[1855] To be specific, protein extraction and mass spectroscopy were done by the following procedure.
[1856] (1) Soybeans were subjected to protein extraction, two-dimensional electrophoresis and transfer to membrane by following the procedures described in Example 1 and 2, and the resulting membrane was stained by shaking in a solution of 0.008% Direct blue in 40% ethanol and 10% acetic acid.
[1857] (2) Then, the membrane was decolorized by repeating a 5-minute treatment with 40% ethanol and 10% acetic acid three times, washed with water for 5 minutes, and then dried by air.
[1858] (3) A protein spot of interest was cut out with a clean cutter blade and put into a centrifugal tube. The cut membrane was subjected to hydrophilization with 50 μL of methanol, followed by washing with 100 μL of water twice and then centrifugal cleaning. Thereafter, 20 μL of 20 mM NH₄HCO₃ and 50% acetonitrile were added.
[1859] (4) 1 μL of 1 pmol/μL lysyl endopeptidase (produced by WAKO) was added, and the solution was left to stand at 37° C. for 60 minutes and then collected in a new centrifugal tube. After 20 μL of 20 mM NH₄HCO₃ and 70% acetonitrile were added to the membrane, the membrane was immersed therein at room temperature for 10 minutes, and the resulting solution was further collected. The solution was dissolved with 0.1% formic acid and 10 μL of 4% acetonitrile and transferred to a tube.
[1860] (5) The collected solution was dried under reduced pressure, dissolved with 15 μL, of solution A (a 0.1% formic acid/4% acetonitrile solution), and analyzed by mass spectroscopy (ESI-TOF5600, produced by AB Sciex).
[1861] (6) Identification of proteins based on the MS data obtained with the mass spectrometer was done by searching the NCBI database.

[1862] Results

[1863] The mass spectrometry of the spots resulted in the detection of the following amino acid sequences. Furthermore, the spots were identified as the following proteins by the analysis of the mass data obtained from the mass spectrometer for the spots at NCBI.
[1864] Spot 1α:

[1865] The amino acid sequences set forth in SEQ ID NOs: 71 to 87 were detected by the mass spectrometry. The protein identified from this mass data was endoplasmin homolog isoform X2 (NCBI accession number XP_006596543.1, amino acid sequence: SEQ ID NO: 70, encoding nucleotide sequence: SEQ ID NO: 69).

[1866] The amino acid sequences set forth in SEQ ID NOs: 90 to 104 were detected by the mass spectrometry. The protein identified from this mass data was endoplasmin homolog isoform X2 (NCBI accession number XP_006601356.1, amino acid sequence: SEQ ID NO: 89, encoding nucleotide sequence: SEQ ID NO: 88).
[1867] Spot 2α

[1868] The amino acid sequences set forth in SEQ ID NOs: 107 to 120 were detected by the mass spectrometry. The protein identified from this mass data was heat shock cognate protein 80 (NCBI accession number XP_003544594.1, amino acid sequence: SEQ ID NO: 106, encoding nucleotide sequence: SEQ ID NO: 105).

[1869] The amino acid sequences set forth in SEQ ID NOs: 123 to 137 were detected by the mass spectrometry. The protein identified from this mass data was heat shock protein 90-1 (NCBI accession number NP_001236612.1, amino acid sequence: SEQ ID NO: 122, encoding nucleotide sequence: SEQ ID NO: 121).

[1870] The amino acid sequences set forth in SEQ ID NOs: 140 to 153 were detected by the mass spectrometry. The protein identified from this mass data was hypothetical protein GLYMA_02G302500 (NCBI accession number KRH73936.1, amino acid sequence: SEQ ID NO: 139, encoding nucleotide sequence: SEQ ID NO: 138).

[1871] Spot 3α:

[1872] The amino acid sequences set forth in SEQ ID NOs: 62 to 68 were detected by the mass spectrometry. The protein identified from this mass data was Cell division cycle protein 48 homolog (UniProt accession number P54774, amino acid sequence: SEQ ID NO: 16, encoding nucleotide sequence: SEQ ID NO: 15).

[1873] Spot 4α:

[1874] The amino acid sequences set forth in SEQ ID NOs: 156, 157 were detected by the mass spectrometry. The protein identified from this mass data was embryo-specific urease isoform X1 (NCBI accession number XP_014630847.1, amino acid sequence: SEQ ID NO: 155, encoding nucleotide sequence: SEQ ID NO: 154).

[1875] Spot 5α:

[1876] The amino acid sequences set forth in SEQ ID NOs: 160, 161 were detected by the mass spectrometry. The protein identified from this mass data was alpha-1,4 glucan phosphorylase L isozyme, chloroplastic/amyloplastic (NCBI accession number XP_006603904.1, amino acid sequence: SEQ ID NO: 159, encoding nucleotide sequence: SEQ ID NO: 158).

[1877] Spot 6α:

[1878] The amino acid sequences set forth in SEQ ID NOs: 164 to 167 were detected by the mass spectrometry. The protein identified from this mass data was aconitate hydratase 1 (NCBI accession number XP_003537655.1, amino acid sequence: SEQ ID NO: 163, encoding nucleotide sequence: SEQ ID NO: 162).

[1879] The amino acid sequences set forth in SEQ ID NOs: 170 to 172 were detected by the mass spectrometry. The protein identified from this mass data was aconitate hydratase 1 (NCBI accession number XP_003517155.1, amino acid sequence: SEQ ID NO: 169, encoding nucleotide sequence: SEQ ID NO: 168).

[1880] Spot 7α:

[1881] The amino acid sequences set forth in SEQ ID NOs: 175 to 187 were detected by the mass spectrometry. The protein identified from this mass data was methionine synthase (NCBI accession number NP 001235794.1, amino acid sequence: SEQ ID NO: 174, encoding nucleotide sequence: SEQ ID NO: 173).

[1882] Spot 8α:

[1883] The amino acid sequences set forth in SEQ ID NOs: 190 to 199 were detected by the mass spectrometry. The protein identified from this mass data was transketolase, chloroplastic (NCBI accession number XP_003521870.1, amino acid sequence: SEQ ID NO: 189, encoding nucleotide sequence: SEQ ID NO: 188).

[1884] Spot 9α:

[1885] The amino acid sequence set forth in SEQ ID NO: 202 was detected by the mass spectrometry. The protein identified from this mass data was lysine-tRNA ligase, cytoplasmic-like isoform X2 (NCBI accession number XP_014625509.1, amino acid sequence: SEQ ID NO: 201, encoding nucleotide sequence: SEQ ID NO: 200).

[1886] Spot 10α

[1887] The amino acid sequences set forth in SEQ ID NOs: 205 to 218 were detected by the mass spectrometry. The protein identified from this mass data was chaperonin CPN60-2, mitochondrial (NCBI accession number XP 003556325.1, amino acid sequence: SEQ ID NO: 204, encoding nucleotide sequence: SEQ ID NO: 203).

[1888] The amino acid sequences set forth in SEQ ID NOs: 221 to 231 were detected by the mass spectrometry. The protein identified from this mass data was chaperonin CPN60-2, mitochondrial-like isoform X1 (NCBI accession number XP_003535967.1, amino acid sequence: SEQ ID NO: 220, encoding nucleotide sequence: SEQ ID NO: 219).

[1889] Spot 11α:

[1890] The amino acid sequences set forth in SEQ ID NOs: 234 to 237 were detected by the mass spectrometry. The protein identified from this mass data was polyadenylate-binding protein 8 isoform X3 (NCBI accession number XP_006578034.1, amino acid sequence: SEQ ID NO: 233, encoding nucleotide sequence: SEQ ID NO: 232).

[1891] Spot 12α:

[1892] The amino acid sequence set forth in SEQ ID NO: 240 was detected by the mass spectrometry. The protein identified from this mass data was pyrophosphate-fructose 6-phosphate 1-phosphotransferase subunit alpha-like (NCBI accession number XP_003555655.1, amino acid sequence: SEQ ID NO: 239, encoding nucleotide sequence: SEQ ID NO: 238).

[1893] Spot 13α:

[1894] The amino acid sequences set forth in SEQ ID NOs: 243 to 252 were detected by the mass spectrometry. The protein identified from this mass data was protein disulfide isomerase-like protein precursor (NCBI accession number NP_001238009.1, amino acid sequence: SEQ ID NO: 242, encoding nucleotide sequence: SEQ ID NO: 241).

[1895] The amino acid sequences set forth in SEQ ID NOs: 255 to 278 were detected by the mass spectrometry. The protein identified from this mass data was protein disulfide-isomerase (NCBI accession number XP_006581588.1, amino acid sequence: SEQ ID NO: 254, encoding nucleotide sequence: SEQ ID NO: 253).

[1896] Spot 14α:

[1897] The amino acid sequences set forth in SEQ ID NOs: 281 to 284 were detected by the mass spectrometry. The protein identified from this mass data was V-type proton ATPase subunit B 2 (NCBI accession number XP_003552473.1, amino acid sequence: SEQ ID NO: 280, encoding nucleotide sequence: SEQ ID NO: 279).

[1898] The amino acid sequences set forth in SEQ ID NOs: 287 to 289 were detected by the mass spectrometry. The protein identified from this mass data was V-type proton ATPase subunit B 2 (NCBI accession number XP_006605857.1, amino acid sequence: SEQ ID NO: 286, encoding nucleotide sequence: SEQ ID NO: 275).

[1899] Spots 15α, 16α:

[1900] The amino acid sequences set forth in SEQ ID NOs: 292 to 304 were detected by the mass spectrometry. The protein identified from this mass data was UTP-glucose-1-phosphate uridylyltransferase (NCBI accession number XP_003544964.1, amino acid sequence: SEQ ID NO: 291, encoding nucleotide sequence: SEQ ID NO: 290).

[1901] The amino acid sequences set forth in SEQ ID NOs: 307 to 318 were detected by the mass spectrometry. The protein identified from this mass data was hypothetical protein GLYMA_02G241100 (NCBI accession number KRH72929.1, amino acid sequence: SEQ ID NO: 306, encoding nucleotide sequence: SEQ ID NO: 305).

[1902] Spot 17α:

[1903] The amino acid sequences set forth in SEQ ID NOs: 321 to 325 were detected by the mass spectrometry. The protein identified from this mass data was guanosine nucleotide diphosphate dissociation inhibitor 2 (NCBI accession number XP_003531293.1, amino acid sequence: SEQ ID NO: 320, encoding nucleotide sequence: SEQ ID NO: 319).

[1904] The amino acid sequences set forth in SEQ ID NOs: 328 to 332 were detected by the mass spectrometry. The protein identified from this mass data was rab GDP dissociation inhibitor alpha-like (NCBI accession number NP_001276273.1, amino acid sequence: SEQ ID NO: 327, encoding nucleotide sequence: SEQ ID NO: 326).

[1905] Spot 18α:

[1906] The amino acid sequences set forth in SEQ ID NOs: 335 to 339 were detected by the mass spectrometry. The protein identified from this mass data was hypothetical protein GLYMA_10G028300 (NCBI accession number KRH32039.1, amino acid sequence: SEQ ID NO: 334, encoding nucleotide sequence: SEQ ID NO: 333).

[1907] Spot 19α:

[1908] The amino acid sequences set forth in SEQ ID NOs: 342 to 346 were detected by the mass spectrometry. The protein identified from this mass data was sucrose binding protein homolog S-64 (NCBI accession number AAF05723.1, amino acid sequence: SEQ ID NO: 341, encoding nucleotide sequence: SEQ ID NO: 340).

[1909] Spot 20α:

[1910] The amino acid sequences set forth in SEQ ID NOs: 35 to 53 were detected by the mass spectrometry. The protein identified from this mass data was Seed biotin-containing protein SBP65 (UniProt accession number Q39846, amino acid sequence: SEQ ID NO: 12, encoding nucleotide sequence: SEQ ID NO: 11).

[1911] Spot 21α:

[1912] The amino acid sequences set forth in SEQ ID NOs: 21 to 28 were detected by the mass spectrometry. The protein identified from this mass data was Ribulose bisphosphate carboxylase large chain (UniProt accession number P27066, amino acid sequence: SEQ ID NO: 4, encoding nucleotide sequence: SEQ ID NO: 3).

[1913] Spot 22α:

[1914] The amino acid sequences set forth in SEQ ID NOs: 29, 30 were detected by the mass spectrometry. The protein identified from this mass data was Gamma-glutamyl hydrolase (UniProt accession number P93164, amino acid sequence: SEQ ID NO: 6, encoding nucleotide sequence: SEQ ID NO: 5).

[1915] Spot 23α:

[1916] The amino acid sequences set forth in SEQ ID NOs: 31, 32 were detected by the mass spectrometry. The protein identified from this mass data was Guanine nucleotide-binding protein subunit beta-like protein (UniProt accession number Q39836, amino acid sequence: SEQ ID NO: 8, encoding nucleotide sequence: SEQ ID NO: 7).

[1917] Spot 24α:

[1918] The amino acid sequences set forth in SEQ ID NOs: 33, 34 were detected by the mass spectrometry. The protein identified from this mass data was Protein SLE3 (UniProt accession number C6TOL2, amino acid sequence: SEQ ID NO: 10, encoding nucleotide sequence: SEQ ID NO: 9).

[1919] Spot 25α:

[1920] The amino acid sequences set forth in SEQ ID NOs: 349 to 356 were detected by the mass spectrometry. The protein identified from this mass data was succinyl-CoA ligase [ADP-forming] subunit beta, mitochondrial (NCBI accession number XP_003537078.1, amino acid sequence: SEQ ID NO: 348, encoding nucleotide sequence: SEQ ID NO: 347).

[1921] The amino acid sequences set forth in SEQ ID NOs: 359 to 365 were detected by the mass spectrometry. The protein identified from this mass data was succinyl-CoA ligase [ADP-forming] subunit beta, mitochondrial (NCBI accession number XP_003542431.1, amino acid sequence: SEQ ID NO: 358, encoding nucleotide sequence: SEQ ID NO: 357).

[1922] Spot 26α:

[1923] The amino acid sequences set forth in SEQ ID NOs: 368 to 382 were detected by the mass spectrometry. The protein identified from this mass data was phosphoglycerate kinase, cytosolic (NCBI accession number XP_003546821.1, amino acid sequence: SEQ ID NO: 367, encoding nucleotide sequence: SEQ ID NO: 366).

[1924] The amino acid sequences set forth in SEQ ID NOs: 385 to 392 were detected by the mass spectrometry. The protein identified from this mass data was phosphoglycerate kinase, cytosolic (NCBI accession number XP_003531482.1, amino acid sequence: SEQ ID NO: 384, encoding nucleotide sequence: SEQ ID NO: 383).

[1925] The amino acid sequences set forth in SEQ ID NOs: 395 to 409 were detected by the mass spectrometry. The protein identified from this mass data was phosphoglycerate kinase, cytosolic (NCBI accession number XP_003531483.1, amino acid sequence: SEQ ID NO: 394, encoding nucleotide sequence: SEQ ID NO: 393).

[1926] Spot 27α:

[1927] The amino acid sequences set forth in SEQ ID NOs: 412 to 416 were detected by the mass spectrometry. The protein identified from this mass data was alcohol dehydrogenase 1 (NCBI accession number XP_003526673.1, amino acid sequence: SEQ ID NO: 411, encoding nucleotide sequence: SEQ ID NO: 410).

[1928] The amino acid sequences set forth in SEQ ID NOs: 419, 420 were detected by the mass spectrometry. The protein identified from this mass data was alcohol dehydrogenase 1 (NCBI accession number XP_003545664.3, amino acid sequence: SEQ ID NO: 418, encoding nucleotide sequence: SEQ ID NO: 417).

[1929] The amino acid sequences set forth in SEQ ID NOs: 423 to 427 were detected by the mass spectrometry. The protein identified from this mass data was alcohol dehydrogenase 1-like (NCBI accession number XP_003544738.1, amino acid sequence: SEQ ID NO: 422, encoding nucleotide sequence: SEQ ID NO: 421).

[1930] Spot 28α:

[1931] The amino acid sequences set forth in SEQ ID NOs: 430 to 433 were detected by the mass spectrometry. The protein identified from this mass data was 35 kDa seed maturation protein isoform X1 (NCBI accession number XP 006576267.1, amino acid sequence: SEQ ID NO: 429, encoding nucleotide sequence: SEQ ID NO: 428).

[1932] Spots 29α, 30α, 31α, 32α, 33α:

[1933] The amino acid sequences set forth in SEQ ID NOs: 436 to 439 were detected by the mass spectrometry. The protein identified from this mass data was glyceraldehyde-3-phosphate dehydrogenase isoform X1 (NCBI accession number XP_014631598.1, amino acid sequence: SEQ ID NO: 435, encoding nucleotide sequence: SEQ ID NO: 434).

[1934] The amino acid sequences set forth in SEQ ID NOs: 442 to 445 were detected by the mass spectrometry. The protein identified from this mass data was glyceraldehyde-3-phosphate dehydrogenase, cytosolic (NCBI accession number XP_006578692.1, amino acid sequence: SEQ ID NO: 441, encoding nucleotide sequence: SEQ ID NO: 440).

[1935] The amino acid sequences set forth in SEQ ID NOs: 448 to 451 were detected by the mass spectrometry. The protein identified from this mass data was uncharacterized protein

[1936] LOC100782924 (NCBI accession number NP_001240046.1, amino acid sequence: SEQ ID NO: 447, encoding nucleotide sequence: SEQ ID NO: 446).

[1937] Spot 34α:

[1938] The amino acid sequence set forth in SEQ ID NO: 454 was detected by the mass spectrometry. The protein identified from this mass data was bifunctional UDP-glucose 4-epimerase and UDP-xylose 4-epimerase 1-like (NCBI accession number XP_003532591.1, amino acid sequence: SEQ ID NO: 453, encoding nucleotide sequence: SEQ ID NO: 452).

[1939] The amino acid sequences set forth in SEQ ID NOs: 457, 458 were detected by the mass spectrometry. The protein identified from this mass data was uncharacterized protein LOC100803483 (NCBI accession number NP_001241075.1, amino acid sequence: SEQ ID NO: 456, encoding nucleotide sequence: SEQ ID NO: 455).

[1940] Spot 35α:

[1941] The amino acid sequences set forth in SEQ ID NOs: 461 to 466 were detected by the mass spectrometry. The protein identified from this mass data was elongation factor 1-alpha (NCBI accession number XP_003553292.1, amino acid sequence: SEQ ID NO: 460, encoding nucleotide sequence: SEQ ID NO: 459).

[1942] The amino acid sequences set forth in SEQ ID NOs: 469 to 471 were detected by the mass spectrometry. The protein identified from this mass data was elongation factor 1-alpha (NCBI accession number XP_003547695.1, amino acid sequence: SEQ ID NO: 468, encoding nucleotide sequence: SEQ ID NO: 467).

[1943] The amino acid sequences set forth in SEQ ID NOs: 474 to 477 were detected by the mass spectrometry. The protein identified from this mass data was elongation factor-1A isoform X1 (NCBI accession number XP_006600131.1, amino acid sequence: SEQ ID NO: 473, encoding nucleotide sequence: SEQ ID NO: 472).

[1944] Spots 36α, 37α:

[1945] The amino acid sequences set forth in SEQ ID NOs: 480 to 483 were detected by the mass spectrometry. The protein identified from this mass data was seed maturation protein PM34 (NCBI accession number NP_001238285.1, amino acid sequence: SEQ ID NO: 479, encoding nucleotide sequence: SEQ ID NO: 478).

[1946] The amino acid sequences set forth in SEQ ID NOs: 486, 487 were detected by the mass spectrometry. The protein identified from this mass data was uncharacterized protein LOC100809384 (NCBI accession number NP_001241158.1, amino acid sequence: SEQ ID NO: 485, encoding nucleotide sequence: SEQ ID NO: 484).

[1947] The amino acid sequences set forth in SEQ ID NOs: 490 to 493 were detected by the mass spectrometry. The protein identified from this mass data was hypothetical protein GLYMA_10G155300 (NCBI accession number KRH33956.1, amino acid sequence: SEQ ID NO: 489, encoding nucleotide sequence: SEQ ID NO: 488).

[1948] Spot 38α

[1949] The amino acid sequences set forth in SEQ ID NOs: 496 to 513 were detected by the mass spectrometry. The protein identified from this mass data was seed biotin-containing protein SBP65-like isoform X1 (NCBI accession number XP_003526237.1, amino acid sequence: SEQ ID NO: 495, encoding nucleotide sequence: SEQ ID NO: 494).

[1950] Spot 39α:

[1951] The amino acid sequence set forth in SEQ ID NO: 516 was detected by the mass spectrometry. The protein identified from this mass data was ATP synthase subunit 0, mitochondrial-like (NCBI accession number XP_003546884.1, amino acid sequence: SEQ ID NO: 515, encoding nucleotide sequence: SEQ ID NO: 514).

[1952] Spots 40α, 56α:

[1953] The amino acid sequences set forth in SEQ ID NOs: 519, 520 were detected by the mass spectrometry. The protein identified from this mass data was P24 oleosin isoform A (NCBI accession number XP_003553822.1, amino acid sequence: SEQ ID NO: 518, encoding nucleotide sequence: SEQ ID NO: 517).

[1954] Spot 41α:

[1955] The amino acid sequence set forth in SEQ ID NO: 523 was detected by the mass spectrometry. The protein identified from this mass data was uncharacterized protein At3g49720-like isoform X2 (NCBI accession number XP_006600908.1, amino acid sequence: SEQ ID NO: 522, encoding nucleotide sequence: SEQ ID NO: 521).

[1956] Spots 42α, 43α

[1957] The amino acid sequences set forth in SEQ ID NOs: 526 to 531 were detected by the mass spectrometry. The protein identified from this mass data was superoxide dismutase [Mn], mitochondrial (NCBI accession number XP_003526813.1, amino acid sequence: SEQ ID NO: 525, encoding nucleotide sequence: SEQ ID NO: 524).

[1958] The amino acid sequences set forth in SEQ ID NOs: 534 to 539 were detected by the mass spectrometry. The protein identified from this mass data was hypothetical protein GLYMA_04G221300 (NCBI accession number KRH64185.1, amino acid sequence: SEQ ID NO: 533, encoding nucleotide sequence: SEQ ID NO: 532).

[1959] Spot 44α:

[1960] The amino acid sequences set forth in SEQ ID NOs: 54 to 61 were detected by the mass spectrometry. The protein identified from this mass data was Ferritin-2 (UniProt accession number Q94IC4, amino acid sequence: SEQ ID NO: 14, encoding nucleotide sequence: SEQ ID NO: β).

[1961] Spot 45α:

[1962] The amino acid sequences set forth in SEQ ID NOs: 542 to 545 were detected by the mass spectrometry. The protein identified from this mass data was uncharacterized protein LOC100499771 (NCBI accession number NP_001235797.1, amino acid sequence: SEQ ID NO: 541, encoding nucleotide sequence: SEQ ID NO: 540).

[1963] The amino acid sequences set forth in SEQ ID NOs: 548 to 551 were detected by the mass spectrometry. The protein identified from this mass data was hypothetical protein GLYMA_09G192800 (NCBI accession number KRH39322.1, amino acid sequence: SEQ ID NO: 547, encoding nucleotide sequence: SEQ ID NO: 546).

[1964] Spot 46α:

[1965] The amino acid sequence set forth in SEQ ID NO: 554 was detected by the mass spectrometry. The protein identified from this mass data was seed maturation protein PM22 (NCBI accession number NP_001237935.1, amino acid sequence: SEQ ID NO: 553, encoding nucleotide sequence: SEQ ID NO: 552).

[1966] Spot 47α:

[1967] The amino acid sequences set forth in SEQ ID NOs: 557, 558 were detected by the mass spectrometry. The protein identified from this mass data was eukaryotic translation initiation factor 5A-2 (NCBI accession number XP 003549690.1, amino acid sequence: SEQ ID NO: 556, encoding nucleotide sequence: SEQ ID NO: 555).

[1968] The amino acid sequences set forth in SEQ ID NOs: 561 to 563 were detected by the mass spectrometry. The protein identified from this mass data was uncharacterized protein LOC100305510 (NCBI accession number NP_001236395.1, amino acid sequence: SEQ ID NO: 560, encoding nucleotide sequence: SEQ ID NO: 559).

[1969] Spot 48α:

[1970] The amino acid sequences set forth in SEQ ID NOs: 566 to 570 were detected by the mass spectrometry. The protein identified from this mass data was uncharacterized protein LOC100306570 (NCBI accession number NP_001236895.1, amino acid sequence: SEQ ID NO: 565, encoding nucleotide sequence: SEQ ID NO: 564).

[1971] Spot 49α:

[1972] The amino acid sequences set forth in SEQ ID NOs: 17 to 20 were detected by the mass spectrometry. The protein identified from this mass data was Bowman-Birk type proteinase inhibitor D-II (UniProt accession number P01064, amino acid sequence: SEQ ID NO: 2, encoding nucleotide sequence: SEQ ID NO: 1).

[1973] Spot 50α:

[1974] The amino acid sequences set forth in SEQ ID NOs: 573 to 576 were detected by the mass spectrometry. The protein identified from this mass data was uncharacterized protein LOC100813859 (NCBI accession number NP_001239816.1, amino acid sequence: SEQ ID NO: 572, encoding nucleotide sequence: SEQ ID NO: 571).

[1975] Spot 51α:

[1976] The amino acid sequences set forth in SEQ ID NOs: 579 to 582 were detected by the mass spectrometry. The protein identified from this mass data was 14-3-3-like protein (NCBI accession number XP_003526571.1, amino acid sequence: SEQ ID NO: 578, encoding nucleotide sequence: SEQ ID NO: 577).

[1977] Spot 52α:

[1978] The amino acid sequences set forth in SEQ ID NOs: 585 to 588 were detected by the mass spectrometry. The protein identified from this mass data was probable fructokinase-4 (NCBI accession number XP 003543564.1, amino acid sequence: SEQ ID NO: 584, encoding nucleotide sequence: SEQ ID NO: 583).

[1979] Spot 53α:

[1980] The amino acid sequences set forth in SEQ ID NOs: 591 to 597 were detected by the mass spectrometry. The protein identified from this mass data was triosephosphate isomerase isoform X1 (NCBI accession number XP_006593480.2, amino acid sequence: SEQ ID NO: 590, encoding nucleotide sequence: SEQ ID NO: 589).

[1981] The amino acid sequences set forth in SEQ ID NOs: 600 to 604 were detected by the mass spectrometry. The protein identified from this mass data was triosephosphate isomerase, cytosolic (NCBI accession number XP 003547334.1, amino acid sequence: SEQ ID NO: 599, encoding nucleotide sequence: SEQ ID NO: 598).

[1982] Spot 54α:

[1983] The amino acid sequences set forth in SEQ ID NOs: 607 to 611 were detected by the mass spectrometry. The protein identified from this mass data was superoxide dismutase [Fe], chloroplastic isoform X1 (NCBI accession number XP_014627751.1, amino acid sequence: SEQ ID NO: 606, encoding nucleotide sequence: SEQ ID NO: 605).

[1984] The amino acid sequences set forth in SEQ ID NOs: 614 to 616 were detected by the mass spectrometry. The protein identified from this mass data was iron-superoxide dismutase (NCBI accession number NP_001237901.1, amino acid sequence: SEQ ID NO: 613, encoding nucleotide sequence: SEQ ID NO: 612).

[1985] Spot 55α:

[1986] The amino acid sequences set forth in SEQ ID NOs: 619 to 635 were detected by the mass spectrometry. The protein identified from this mass data was 51 kDa seed maturation protein precursor (NCBI accession number NP_001238138.1, amino acid sequence: SEQ ID NO: 618, encoding nucleotide sequence: SEQ ID NO: 617).

[1987] The amino acid sequences set forth in SEQ ID NOs: 638 to 649 were detected by the mass spectrometry. The protein identified from this mass data was Lea protein precursor (NCBI accession number NP_001238201.1, amino acid sequence: SEQ ID NO: 637, encoding nucleotide sequence: SEQ ID NO: 636).

### Example 4

### Identification of Epitopes (1)

[1988] Identification of epitopes was carried out by the following procedure as to each of the antigen proteins identified in Example 3.

[1989] (A) Epitope Mapping

[1990] Epitope mapping was carried out using a library of overlapping peptide fragments (length: 15 amino acids) corresponding to the sequences of proteins bound patient-specifically to IgE antibodies in serum, which were obtained as a result of 2D-western of soybeans.

[1991] The peptides to be synthesized were shifted by 10 amino acids. Thus, each peptide had an overlap of 5 amino acids with each of the peptides previous and subsequent thereto.

[1992] For preparation of peptide arrays, peptide synthesis of interest was carried out in incremental steps on a modified cellulose membrane by the Intavis SPOT synthesis technique, which is a technique of synthesizing peptides of interest through 9-fluorenylmethoxycarbonyl (Fmoc) chemical reaction, using an automated synthesis apparatus (Intavis MultiPep RS). The aforementioned modified cellulose membrane (hereinafter also referred to as the membrane) bound to the obtained peptides of interest was used in epitope mapping.

[1993] The presence or absence of binding, to each peptide fragment, of an IgE antibody present in the serum of a patient allergic to a soybean was measured by immunoblotting using the membrane on which the peptide fragments were synthesized by SPOT. Immunoblotting of the membrane was carried out according to the following procedure using, as a primary antibody, a serum sample from an allergic patient, and anti-human IgE-HRP as a secondary antibody.
[1994] (1) The membrane was subjected to hydrophilization with methanol for 5 minutes.
[1995] (2) The hydrophilized membrane was shaken overnight in a 5% skim milk/PBST solution (a PBS buffer containing 0.1% Tween 20 nonionic surfactant) at 4° C.
[1996] (3) The membrane was washed with a PBST solution three times.
[1997] (4) The serum sample (1:40, α 5% skim milk/PBST solution) was added thereto as a primary antibody and shaken overnight at 4° C. In this operation, a protease inhibitor (Complete, produced by Roche) was added.
[1998] (5) The membrane was washed with a PBST solution three times.
[1999] (6) Anti-human IgE-HRP (1:10,000, α 5% skim milk/PBST solution) was added thereto as a secondary antibody and shaken at room temperature for one hour.
[2000] (7) The membrane was washed with a PBST solution three times.
[2001] (8) The membrane was left to stand in ECL plus (produced by Thermo Fisher Scientific) for 5 minutes.
[2002] (9) The membrane treated as described above in (1) to (8) was subjected to fluorescent image scanning using Amersham Imager 600.

[2003] Peptide fragments bound to IgE antibodies from allergic patients in immunoblotting were used as candidate peptides of epitopes.

[2004] (B) Overlapping

[2005] Thereafter, for the sequences of peptides bound patient-specifically to IgE antibodies in serum in the epitope mapping described above in (A), a library of overlapping peptide fragments (length: 10 amino acids) was obtained as sequences having the sequences of these peptides as well as additional sequences subsequent to the peptides in the amino acid sequences of antigen proteins on which the epitopes were detected. Synthesis of this library was carried out by the Fmoc chemical synthesis method in the same manner as in (A) mentioned above. The peptides to be synthesized were shifted by one amino acid. Thus, each peptide had an overlap of 9 amino acids with the peptide subsequent thereto.

[2006] The presence or absence of binding of an IgE antibody from an allergic patient to each peptide fragment in this library of overlapping peptide fragments was measured by immunoblotting in the same manner as in (A) mentioned above. A common sequence of peptides bound to IgE antibodies from allergic patients was identified to determine peptides having the minimum number of amino acids functioning as an epitope. The peptides determined in (B) are referred to as the “original sequences”.

[2007] As one example of the results, the results of determining the original sequences by the overlapping technique as to a partial sequence (a region of amino acids 571-590 of SEQ ID NO: 495/SEQ ID NO: 964 of seed biotin-containing protein SBP65-like isoform X1 (spot 38α) are shown in FIG. 4. Strong binding of polypeptides having the amino acid sequences of SEQ ID NOs: 965-967 to the IgE antibody from the allergic patient was observed. Slightly weak binding of SEQ ID NO: 968 to the IgE antibody from the allergic patient was observed. Binding of SEQ ID NOs: 969-975 to the IgE antibody from the allergic patient was not observed. As a result, SEQ ID NO: 864, α common sequence of SEQ ID NOs: 965-968, was identified as an original sequence.

[2008] (C) Alanine Scanning

[2009] From the “original sequences” determined as described above in (B), a library of peptide fragments in which N-terminal amino acids were substituted one by one by alanine according to a technique called alanine scanning (Non Patent Literature 1) was prepared by the Fmoc chemical synthesis method in the same manner as in (A) mentioned above. The presence or absence of binding of an IgE antibody present in the serum of an allergic patient to each peptide fragment was measured by immunoblotting in the same manner as in (A) mentioned above. Amino acids at positions where the binding activity against IgE antibodies from allergic patients was lost by the substitution by alanine were confirmed as positions important for exertion of antigenicity. Also, Amino acids at positions where the binding activity against IgE antibodies from allergic patients was maintained even after the substitution by alanine were confirmed as substitutable positions that were not important for exertion of antigenicity. Common sequences (consensus sequences) important for exertion of antigenicity were found by this analysis.

[2010] As one example of the results, the results of performing alanine scanning as to the amino acid sequence of SEQ ID NO: 864 identified in (B) are shown in FIG. 5. Peptides having SEQ ID NOs: 977-979 in which the amino acids at positions 1-3, respectively, of SEQ ID NO: 864 were substituted by alanine lost their binding activity against IgE antibodies from allergic patients. Thus, the amino acids at positions 1-3 of SEQ ID NO: 864 were identified as amino acids important for the binding to IgE antibodies from allergic patients.

[2011] (D) Results

[2012] (1β) Epitope of Endoplasmin Homolog Isoform X2 (Spot 1α)

[2013] SEQ ID NOs: 652, 655, 657, and 658-660 were identified as epitopes of endoplasmin homolog isoform X2 by the procedure of (B) mentioned above.

[2014] Amino acids important for binding to IgE antibodies from allergic patients were identified by the procedure of (C) mentioned above as to each of SEQ ID NOs: 652, 655, 657, and 658-660.

[2015] It was revealed for SEQ ID NO: 652 that the amino acids at positions 3 and 5 are amino acids particularly important for the binding to IgE antibodies from allergic patients, and the amino acid at position 2 is an amino acid that influences the binding to IgE antibodies from allergic patients. The amino acids at positions 1, 4, and 6-8 of SEQ ID NO: 652 had no influence on the binding activity against IgE antibodies from allergic patients when substituted by alanine.

[2016] It was revealed for SEQ ID NO: 655 that the amino acids at positions 4-7 are amino acids particularly important for the binding to IgE antibodies from allergic patients, and the amino acid at position 2 is an amino acid that influences the binding to IgE antibodies from allergic patients. The amino acids at positions 1, 3, 8 and 9 of SEQ ID NO: 655 had no influence on the binding activity against IgE antibodies from allergic patients when substituted by alanine.

[2017] For SEQ ID NO: 657, the amino acids at positions 1-5 and 11 were amino acids particularly important for the binding to IgE antibodies from allergic patients. The amino acids at positions 6-10 and 12-15 of SEQ ID NO: 657 had no influence on the binding activity against IgE antibodies from allergic patients when substituted by alanine.

[2018] For SEQ ID NOs: 658-660, all the amino acids were amino acids particularly important for the binding to IgE antibodies from allergic patients.

[2019] (2β) Epitope of Heat Shock Cognate Protein 80 (Spot 2α)

[2020] SEQ ID NOs: 663, 666, 669, 670-672, 675, 676-678, 681, 684, 687, 689, and 690-692 were identified as epitopes of heat shock cognate protein 80 by the procedure of (B) mentioned above.

[2021] Amino acids important for binding to IgE antibodies from allergic patients were identified by the procedure of (C) mentioned above as to each of SEQ ID NOs: 663, 666, 669, 670-672, 675-678, 681, 684, 687 and 689-692.

[2022] It was revealed for SEQ ID NO: 663 that the amino acids at positions 1, 4 and 5 are amino acids particularly important for the binding to IgE antibodies from allergic patients, and the amino acid at position 7 is an amino acid that influences the binding to IgE antibodies from allergic patients. The amino acids at positions 2, 3, 6, 8 and 9 of SEQ ID NO: 663 had no influence on the binding activity against IgE antibodies from allergic patients when substituted by alanine.

[2023] It was revealed for SEQ ID NO: 666 that the amino acids at positions 5-8 are amino acids particularly important for the binding to IgE antibodies from allergic patients, and the amino acid at position 12 is an amino acid that influences the binding to IgE antibodies from allergic patients. The amino acids at positions 1-4, 9-11, and 13-15 of SEQ ID NO: 666 had no influence on the binding activity against IgE antibodies from allergic patients when substituted by alanine.

[2024] It was revealed for SEQ ID NO: 669 that the amino acids at positions 2-4 are amino acids particularly important for the binding to IgE antibodies from allergic patients, and the amino acid at position 1 is an amino acid that influences the binding to IgE antibodies from allergic patients. The amino acid at position 5 of SEQ ID NO: 669 had no influence on the binding activity against IgE antibodies from allergic patients when substituted by alanine

[2025] It was revealed for SEQ ID NO: 675 that the amino acids at positions 3-5, 13 and 14 are amino acids particularly important for the binding to IgE antibodies from allergic patients, and the amino acid at position 15 is an amino acid that influences the binding to IgE antibodies from allergic patients. The amino acids at positions 1, 2 and 6-12 of SEQ ID NO: 675 had no influence on the binding activity against IgE antibodies from allergic patients when substituted by alanine.

[2026] It was revealed for SEQ ID NO: 681 that the amino acids at positions 5, 10 and 14 are amino acids particularly important for the binding to IgE antibodies from allergic patients, and the amino acids at positions 6-8 and 15 are amino acids that influence the binding to IgE antibodies from allergic patients. The amino acids at positions 1-4, 9 and 11-13 of SEQ ID NO: 681 had no influence on the binding activity against IgE antibodies from allergic patients when substituted by alanine.

[2027] It was revealed for SEQ ID NO: 684 that the amino acids at positions 2, 5, 10, and 11 are amino acids particularly important for the binding to IgE antibodies from allergic patients. The amino acids at positions 1, 3, 4, 6-9, and 12-15 of SEQ ID NO: 684 had no influence on the binding activity against IgE antibodies from allergic patients when substituted by alanine

[2028] It was revealed for SEQ ID NO: 687 that the amino acids at positions 1, 5, 10, and 11 are amino acids particularly important for the binding to IgE antibodies from allergic patients. The amino acids at positions 2, 3, 4, 6-9 and 12-15 of SEQ ID NO: 687 had no influence on the binding activity against IgE antibodies from allergic patients when substituted by alanine.

[2029] It was revealed for SEQ ID NO: 689 that the amino acids at positions 1-3, 12 and 13 are amino acids particularly important for the binding to IgE antibodies from allergic patients. The amino acids at positions 4-11, 14 and 15 of SEQ ID NO: 689 had no influence on the binding activity against IgE antibodies from allergic patients when substituted by alanine.

[2030] For SEQ ID NOs: 670-672, 676-678, and 690-692, all the amino acids were amino acids particularly important for the binding to IgE antibodies from allergic patients.

[2031] (3β) Epitope of Cell Division Cycle Protein 48 Homolog (Spot 3α)

[2032] SEQ ID NOs: 695, 697, 699, and 700-716 were identified as epitopes of Cell division cycle protein 48 homolog by the procedure of (B) mentioned above.

[2033] Amino acids important for binding to IgE antibodies from allergic patients were identified by the procedure of (C) mentioned above as to each of SEQ ID NOs: 695, 697, 699 and 700-716.

[2034] It was revealed for SEQ ID NO: 695 that the amino acids at positions 11, 12 and 14 are amino acids particularly important for the binding to IgE antibodies from allergic patients, and the amino acids at positions 4-10, 13 and 15 are amino acids that influence the binding to IgE antibodies from allergic patients. The amino acids at positions 1-3 of SEQ ID NO: 695 had no influence on the binding activity against IgE antibodies from allergic patients when substituted by alanine.

[2035] It was revealed for SEQ ID NO: 697 that the amino acids at positions 14 and 15 are amino acids particularly important for the binding to IgE antibodies from allergic patients. The amino acids at positions 1-13 of SEQ ID NO: 697 had no influence on the binding activity against IgE antibodies from allergic patients when substituted by alanine.

[2036] It was revealed for SEQ ID NO: 699 that the amino acids at positions 5-7 are amino acids particularly important for the binding to IgE antibodies from allergic patients. The amino acids at positions 1-4 of SEQ ID NO: 699 had no influence on the binding activity against IgE antibodies from allergic patients when substituted by alanine.

[2037] For SEQ ID NOs: 700-716, all the amino acids were amino acids particularly important for the binding to IgE antibodies from allergic patients.

[2038] (4β) Epitope of Embryo-Specific Urease Isoform X1 (Spot 4α)

[2039] SEQ ID NOs: 719, 722, 725, 726-728, and 731 were identified as epitopes of embryo-specific urease isoform X1 by the procedure of (B) mentioned above.

[2040] Amino acids important for binding to IgE antibodies from allergic patients were identified by the procedure of (C) mentioned above as to each of SEQ ID NOs: 719, 722, 725, 726-728, and 731.

[2041] It was revealed for SEQ ID NO: 719 that the amino acids at positions 8-10 are amino acids particularly important for the binding to IgE antibodies from allergic patients, and the amino acid at position 6 is an amino acid that influences the binding to IgE antibodies from allergic patients. The amino acids at positions 1-5 and 7 of SEQ ID NO: 719 had no influence on the binding activity against IgE antibodies from allergic patients when substituted by alanine.

[2042] It was revealed for SEQ ID NO: 722 that the amino acids at positions 1 and 4-6 are amino acids particularly important for the binding to IgE antibodies from allergic patients, and the amino acid at position 2 is an amino acid that influences the binding to IgE antibodies from allergic patients. The amino acids at positions 3 and 7 of SEQ ID NO: 722 had no influence on the binding activity against IgE antibodies from allergic patients when substituted by alanine.

[2043] It was revealed for SEQ ID NO: 725 that the amino acids at positions 4, 6, 8 and 10 are amino acids particularly important for the binding to IgE antibodies from allergic patients, and the amino acid at position 9 is an amino acid that influences the binding to IgE antibodies from allergic patients. The amino acids at positions 1-3, 5 and 7 of SEQ ID NO: 725 had no influence on the binding activity against IgE antibodies from allergic patients when substituted by alanine.

[2044] It was revealed for SEQ ID NO: 731 that the amino acids at positions 4, 6, 10, 11, 14 and 15 are amino acids particularly important for the binding to IgE antibodies from allergic patients, and the amino acid at position 3 is an amino acid that influences the binding to IgE antibodies from allergic patients. The amino acids at positions 1, 2, 5, 7-9, 12 and 13 of SEQ ID NO: 731 had no influence on the binding activity against IgE antibodies from allergic patients when substituted by alanine.

[2045] For SEQ ID NOs: 726-728, all the amino acids were amino acids particularly important for the binding to IgE antibodies from allergic patients.

[2046] (5β) Epitope of alpha-1,4 glucan phosphorylase L isozyme, chloroplastic/amyloplastic (spot 5α)

[2047] SEQ ID NOs: 734 and 735-738 were identified as epitopes of alpha-1,4 glucan phosphorylase L isozyme, chloroplastic/amyloplastic by the procedure of (B) mentioned above.

[2048] Amino acids important for binding to IgE antibodies from allergic patients were identified by the procedure of (C) mentioned above as to each of SEQ ID NOs: 734, 735-738.

[2049] It was revealed for SEQ ID NO: 734 that the amino acids at positions 7, 8, 10, 12 and 14 are amino acids particularly important for the binding to IgE antibodies from allergic patients, and the amino acids at positions 15 is an amino acid that influences the binding to IgE antibodies from allergic patients. The amino acids at positions 1-6, 9, 11 and 13 of SEQ ID NO: 734 had no influence on the binding activity against IgE antibodies from allergic patients when substituted by alanine.

[2050] For SEQ ID NOs: 735-738, all the amino acids were amino acids particularly important for the binding to IgE antibodies from allergic patients.

[2051] (6β) Epitope of Aconitate Hydratase 1 (Spot 6α)

[2052] SEQ ID NOs: 739 and 740 were identified as epitopes of aconitate hydratase 1 by the procedure of (B) mentioned above.

[2053] Amino acids important for binding to IgE antibodies from allergic patients were identified by the procedure of (C) mentioned above as to each of SEQ 1D NOs: 739 and 740.

[2054] For SEQ ID NOs: 739 and 740, all the amino acids were amino acids particularly important for the binding to IgE antibodies from allergic patients.

[2055] (7β) Epitope of Methionine Synthase (Spot 7α)

[2056] SEQ ID NOs: 741 and 744 were identified as epitopes of methionine synthase by the procedure of (B) mentioned above.

[2057] Amino acids important for binding to IgE antibodies from allergic patients were identified by the procedure of (C) mentioned above as to each of SEQ ID NOs: 741 and 744.

[2058] It was revealed for SEQ ID NO: 744 that the amino acids at positions 8, 9, 11-13 and 15 are amino acids particularly important for the binding to IgE antibodies from allergic patients, and the amino acid at position 10 is an amino acid that influences the binding to IgE antibodies from allergic patients. The amino acids at positions 1-7 and 14 of SEQ ID NO: 744 had no influence on the binding activity against IgE antibodies from allergic patients when substituted by alanine.

[2059] For SEQ ID NO: 741, all the amino acids were amino acids particularly important for the binding to IgE antibodies from allergic patients.

[2060] (9β) Epitope of Lysine-tRNA Ligase, Cytoplasmic-Like Isoform X2 (Spot 9α)

[2061] SEQ ID NOs: 747 and 749 were identified as epitopes of lysine-tRNA ligase, cytoplasmic-like isoform X2 by the procedure of (B) mentioned above.

[2062] Amino acids important for binding to IgE antibodies from allergic patients were identified by the procedure of (C) mentioned above as to each of SEQ ID NOs: 747 and 749.

[2063] It was revealed for SEQ ID NO: 747 that the amino acids at positions 3, 8 and 9 are amino acids particularly important for the binding to IgE antibodies from allergic patients, and the amino acid at position 1 is an amino acid that influences the binding to IgE antibodies from allergic patients. The amino acids at positions 2, 4-7 and 10 of SEQ ID NO: 747 had no influence on the binding activity against IgE antibodies from allergic patients when substituted by alanine.

[2064] It was revealed for SEQ ID NO: 749 that the amino acids at positions 1-5, 7, and 8 are amino acids particularly important for the binding to IgE antibodies from allergic patients. The amino acid at position 6 of SEQ ID NO: 749 had no influence on the binding activity against IgE antibodies from allergic patients when substituted by alanine.

[2065] (11β) Epitope of Polyadenylate-Binding Protein 8 Isoform X3 (Spot 11α)

[2066] SEQ ID NOs: 753 and 754 were identified as epitopes of polyadenylate-binding protein 8 isoform X3 by the procedure of (B) mentioned above.

[2067] Amino acids important for binding to IgE antibodies from allergic patients were identified by the procedure of (C) mentioned above as to each of SEQ ID NOs: 753 and 754.

[2068] It was revealed for SEQ ID NO: 753 that the amino acids at positions 1, 2, 4 and 5 are amino acids particularly important for the binding to IgE antibodies from allergic patients, and the amino acid at position 6 is an amino acid that influences the binding to IgE antibodies from allergic patients. The amino acids at positions 3 and 7-10 of SEQ ID NO: 753 had no influence on the binding activity against IgE antibodies from allergic patients when substituted by alanine.

[2069] For SEQ ID NO: 754, all the amino acids were amino acids particularly important for the binding to IgE antibodies from allergic patients.

[2070] (12β) Epitope of Prophosphate-Fuctose 6-phosphate 1-phosphotransferase Sbunit Alpha-Like (Spot 12α)

[2071] SEQ ID NO: 755 was identified as an epitope of pyrophosphate--fructose 6-phosphate 1-phosphotransferase subunit alpha-like by the procedure of (B) mentioned above.

[2072] Amino acids important for binding to IgE antibodies from allergic patients were identified by the procedure of (C) mentioned above as to SEQ ID NO: 755.

[2073] For SEQ ID NO: 755, all the amino acids were amino acids particularly important for the binding to IgE antibodies from allergic patients.

[2074] (13β) Epitope of Protein Disulfide Isomerase-Lke Protein Precursor (Sot 13α)

[2075] SEQ ID NO: 758 was identified as an epitope of protein disulfide isomerase-like protein precursor by the procedure of (B) mentioned above.

[2076] Amino acids important for binding to IgE antibodies from allergic patients were identified by the procedure of (C) mentioned above as to SEQ ID NO: 758.

[2077] It was revealed for SEQ ID NO: 758 that the amino acids at positions 3 and 15 are amino acids particularly important for the binding to IgE antibodies from allergic patients, and the amino acids at positions 5, 10, 12 and 13 are amino acids that influence the binding to IgE antibodies from allergic patients. The amino acids at positions 1, 2, 4, 6-9, 11 and 14 of SEQ ID NO: 758 had no influence on the binding activity against IgE antibodies from allergic patients when substituted by alanine.

[2078] (14β) Epitope of V-Tpe Poton ATPase Sbunit B 2 (Sot 14α

[2079] SEQ ID NOs: 761 and 764 were identified as epitopes of V-type proton ATPase subunit B 2 by the procedure of (B) mentioned above.

[2080] Amino acids important for binding to IgE antibodies from allergic patients were identified by the procedure of (C) mentioned above as to each of SEQ ID NOs: 761 and 764.

[2081] It was revealed for SEQ ID NO: 761 that the amino acids at positions 6, 7 and 12-15 are amino acids particularly important for the binding to IgE antibodies from allergic patients, and the amino acid at position 8 is an amino acid that influences the binding to IgE antibodies from allergic patients. The amino acids at positions 1-5 and 9-11 of SEQ ID NO: 761 had no influence on the binding activity against IgE antibodies from allergic patients when substituted by alanine.

[2082] It was revealed for SEQ ID NO: 764 that the amino acids at positions 1, 2, 12 and 14 are amino acids particularly important for the binding to IgE antibodies from allergic patients, and the amino acids at positions 3-5, 11 and 13 are amino acids that influence the binding to IgE antibodies from allergic patients. The amino acids at positions 6-10 and 15 of SEQ ID NO: 746 had no influence on the binding activity against IgE antibodies from allergic patients when substituted by alanine.

[2083] (15β) Epitope of UTP-glucose-1-phosphate Uridylyltransferase (Spots 15α and 16α)

[2084] SEQ ID NO: 766 was identified as an epitope of UTP-glucose-1-phosphate uridylyltransferase by the procedure of (B) mentioned above.

[2085] Amino acids important for binding to IgE antibodies from allergic patients were identified by the procedure of (C) mentioned above as to SEQ ID NOs: 766.

[2086] It was revealed for SEQ ID NO: 766 that the amino acids at positions 2 and 3 are amino acids particularly important for the binding to IgE antibodies from allergic patients. The amino acids at positions 1 and 4-15 of SEQ ID NO: 766 had no influence on the binding activity against IgE antibodies from allergic patients when substituted by alanine.

[2087] (17β) Epitope of Guanosine Nucleotide Diphosphate Dissociation Inhibitor 2 (Spot 17α)

[2088] SEQ ID NO: 767 was identified as an epitope of guanosine nucleotide diphosphate dissociation inhibitor 2 by the procedure of (B) mentioned above.

[2089] Amino acids important for binding to IgE antibodies from allergic patients were identified by the procedure of (C) mentioned above as to SEQ ID NO: 767.

[2090] For SEQ ID NO: 767, all the amino acids were amino acids particularly important for the binding to IgE antibodies from allergic patients.

[2091] (18β) Epitope of Hypothetical Protein GLYMA 10G028300 (Spot 18α)

[2092] SEQ ID NOs: 750, 768, 771, 772, and 775 were identified as epitopes of hypothetical protein GLYMA_10G028300 by the procedure of (B) mentioned above.

[2093] Amino acids important for binding to IgE antibodies from allergic patients were identified by the procedure of (C) mentioned above as to each of SEQ ID NOs: 750, 768, 771, 772 and 775.

[2094] It was revealed for SEQ ID NO: 771 that the amino acids at positions 8 and 11-15 are amino acids particularly important for the binding to IgE antibodies from allergic patients, and the amino acid at position 10 is an amino acid that influences the binding to IgE antibodies from allergic patients. The amino acids at positions 1-7 and 9 of SEQ ID NO: 771 had no influence on the binding activity against IgE antibodies from allergic patients when substituted by alanine.

[2095] It was revealed for SEQ ID NO: 775 that the amino acids at positions 2-6 and 8 are amino acids particularly important for the binding to IgE antibodies from allergic patients, and the amino acid at position 7 is an amino acid that influences the binding to IgE antibodies from allergic patients. The amino acids at positions 1, 9 and 10 of SEQ ID NO: 775 had no influence on the binding activity against IgE antibodies from allergic patients when substituted by alanine.

[2096] For SEQ ID NOs: 750, 768 and 772, all the amino acids were amino acids particularly important for the binding to IgE antibodies from allergic patients.

[2097] (19β) Epitope of Sucrose Binding Protein Homolog S-64 (Spot 19α)

[2098] SEQ ID NOs: 778, 781, 784, 786, and 787 were identified as epitopes of sucrose binding protein homolog S-64 by the procedure of (B) mentioned above.

[2099] Amino acids important for binding to IgE antibodies from allergic patients were identified by the procedure of (C) mentioned above as to each of SEQ ID NOs: 778, 781, 784, 786 and 787.

[2100] It was revealed for SEQ ID NO: 778 that the amino acids at positions 6-8, 13 and 14 are amino acids particularly important for the binding to IgE antibodies from allergic patients, and the amino acid at position 9 is an amino acid that influences the binding to IgE antibodies from allergic patients. The amino acids at positions 1-5, 10-12 and 15 of SEQ ID NO: 778 had no influence on the binding activity against IgE antibodies from allergic patients when substituted by alanine.

[2101] It was revealed for SEQ ID NO: 781 that the amino acids at positions 9, 11 and 12 are amino acids particularly important for the binding to IgE antibodies from allergic patients, and the amino acid at position 6 is an amino acid that influences the binding to IgE antibodies from allergic patients. The amino acids at positions 1-5, 7, 8, 10 and 13-15 of SEQ ID NO: 781 had no influence on the binding activity against IgE antibodies from allergic patients when substituted by alanine.

[2102] It was revealed for SEQ ID NO: 784 that the amino acids at positions 11-13 are amino acids particularly important for the binding to IgE antibodies from allergic patients, and the amino acids at positions 2-8 and 14 are amino acids that influence the binding to IgE antibodies from allergic patients. The amino acids at positions 1, 9, 10 and 15 of SEQ ID NO: 784 had no influence on the binding activity against IgE antibodies from allergic patients when substituted by alanine.

[2103] It was revealed for SEQ ID NO: 786 that the amino acids at positions 2 and 3 are amino acids particularly important for the binding to IgE antibodies from allergic patients. The amino acids at positions 1-2 and 5-15 of SEQ ID NO: 786 had no influence on the binding activity against IgE antibodies from allergic patients when substituted by alanine.

[2104] For SEQ ID NO: 787, all the amino acids were amino acids particularly important for the binding to IgE antibodies from allergic patients.

[2105] (20β) Epitope of Seed Biotin-Containing Protein SBP65 (Spot 20α)

[2106] SEQ ID NOs: 788-792 were identified as epitopes of Seed biotin-containing protein SBP65 by the procedure of (B) mentioned above.

[2107] Amino acids important for binding to IgE antibodies from allergic patients were identified by the procedure of (C) mentioned above as to each of SEQ ID NOs: 788-792.

[2108] For SEQ ID NOs: 788-792, all the amino acids were amino acids particularly important for the binding to IgE antibodies from allergic patients.

[2109] (21β) Epitope of Ribulose Bisphosphate Carboxylase Large Chain (Spot 21α)

[2110] SEQ ID NOs: 793-802 were identified as epitopes of Ribulose bisphosphate carboxylase large chain by the procedure of (B) mentioned above.

[2111] Amino acids important for binding to IgE antibodies from allergic patients were identified by the procedure of (C) mentioned above as to each of SEQ ID NOs: 793-802.

[2112] For SEQ ID NOs: 793-802, all the amino acids were amino acids particularly important for the binding to IgE antibodies from allergic patients.

[2113] (22β) Epitope of Gamma-Glutamyl Hydrolase (Spot 22α)

[2114] SEQ ID NOs: 803-808 were identified as epitopes of Gamma-glutamyl hydrolase by the procedure of (B) mentioned above.

[2115] Amino acids important for binding to IgE antibodies from allergic patients were identified by the procedure of (C) mentioned above as to each of SEQ ID NOs: 803-808.

[2116] For SEQ ID NOs: 803-808, all the amino acids were amino acids particularly important for the binding to IgE antibodies from allergic patients.

[2117] (23β) Epitope of Guanine Nucleotide-Binding Protein Subunit Beta-Like Protein (Spot 23 α)

[2118] SEQ ID NOs: 809-812 were identified as epitopes of Guanine nucleotide-binding protein subunit beta-like protein by the procedure of (B) mentioned above.

[2119] Amino acids important for binding to IgE antibodies from allergic patients were identified by the procedure of (C) mentioned above as to each of SEQ ID NOs: 809-812.

[2120] For SEQ ID NOs: 809-812, all the amino acids were amino acids particularly important for the binding to IgE antibodies from allergic patients.

[2121] (24β) Epitope of Protein SLE3 (Spot 24α)

[2122] SEQ ID NO: 813 was identified as an epitope of Protein SLE3 by the procedure of (B) mentioned above.

[2123] Amino acids important for binding to IgE antibodies from allergic patients were identified by the procedure of (C) mentioned above as to SEQ ID NO: 813.

[2124] For SEQ ID NO: 813, all the amino acids were amino acids particularly important for the binding to IgE antibodies from allergic patients.

[2125] (25β) Epitope of Succinyl-CoA Ligase [ADP-Forming] Subunit Beta, Mitochondrial (Spot 25α)

[2126] SEQ ID NOs: 814 and 815 were identified as epitopes of succinyl-CoA ligase [ADP-forming] subunit beta, mitochondrial by the procedure of (B) mentioned above.

[2127] Amino acids important for binding to IgE antibodies from allergic patients were identified by the procedure of (C) mentioned above as to each of SEQ ID NOs: 814 and 815.

[2128] For SEQ ID NOs: 814 and 815, all the amino acids were amino acids particularly important for the binding to IgE antibodies from allergic patients.

[2129] (26β) Epitope of Phosphoglycerate Kinase, Cytosolic (Spot 26α)

[2130] SEQ ID NOs: 816 and 819 were identified as epitopes of phosphoglycerate kinase, cytosolic by the procedure of (B) mentioned above.

[2131] Amino acids important for binding to IgE antibodies from allergic patients were identified by the procedure of (C) mentioned above as to each of SEQ ID NOs: 816 and 819.

[2132] It was revealed for SEQ ID NO: 819 that the amino acids at positions 1-3 are amino acids particularly important for the binding to IgE antibodies from allergic patients, and the amino acid at position 4 is an amino acid that influences the binding to IgE antibodies from allergic patients. The amino acids at positions 5-7 of SEQ ID NO: 819 had no influence on the binding activity against IgE antibodies from allergic patients when substituted by alanine.

[2133] For SEQ ID NO: 816, all the amino acids were amino acids particularly important for the binding to IgE antibodies from allergic patients.

[2134] (27β) Epitope of Alcohol Dehydrogenase 1 (Spot 27α)

[2135] SEQ ID NO: 820 was identified as an epitope of alcohol dehydrogenase 1 by the procedure of (B) mentioned above.

[2136] Amino acids important for binding to IgE antibodies from allergic patients were identified by the procedure of (C) mentioned above as to SEQ ID NO: 820.

[2137] For SEQ ID NO: 820, all the amino acids were amino acids particularly important for the binding to IgE antibodies from allergic patients.

[2138] (28β) Epitope of 35 kDa Seed Maturation Protein Isoform X1 (Spot 28α)

[2139] SEQ ID NOs: 823, 826, 829, and 830-835 were identified as epitopes of 35 kDa seed maturation protein isoform X1 by the procedure of (B) mentioned above.

[2140] Amino acids important for binding to IgE antibodies from allergic patients were identified by the procedure of (C) mentioned above as to each of SEQ ID NOs: 823, 826, 829 and 830-835.

[2141] It was revealed for SEQ ID NO: 823 that the amino acids at positions 2 and 7-10 are amino acids particularly important for the binding to IgE antibodies from allergic patients, and the amino acids at positions 1, 4 are amino acids that influence the binding to IgE antibodies from allergic patients. The amino acids at positions 3, 5 and 6 of SEQ ID NO: 823 had no influence on the binding activity against IgE antibodies from allergic patients when substituted by alanine

[2142] It was revealed for SEQ ID NO: 826 that the amino acids at positions 2, 7 and 8 are amino acids particularly important for the binding to IgE antibodies from allergic patients, and the amino acids at positions 3 and 14 are amino acids that influence the binding to IgE antibodies from allergic patients. The amino acids at positions 1, 4-6, 9-13 and 15 of SEQ ID NO: 826 had no influence on the binding activity against IgE antibodies from allergic patients when substituted by alanine.

[2143] It was revealed for SEQ ID NO: 829 that the amino acids at positions 4, 7-9 and 14 are amino acids particularly important for the binding to IgE antibodies from allergic patients, and the amino acids at positions 10 and 11 are amino acids that influence the binding to IgE antibodies from allergic patients. The amino acids at positions 1-3, 5, 6, 12, 13 and 15 of SEQ ID NO: 829 had no influence on the binding activity against IgE antibodies from allergic patients when substituted by alanine.

[2144] For SEQ ID NOs: 830-835, all the amino acids were amino acids particularly important for the binding to IgE antibodies from allergic patients.

[2145] (29β) Epitope of glyceraldehyde-3-phosphate dehydrogenase isoform X1 (spots 29α, 30α, 31α, 32α, and 33α)

[2146] SEQ ID NOs: 838 and 839 were identified as epitopes of glyceraldehyde-3-phosphate dehydrogenase isoform X1 by the procedure of (B) mentioned above.

[2147] Amino acids important for binding to IgE antibodies from allergic patients were identified by the procedure of (C) mentioned above as to each of SEQ ID NOs: 838 and 839.

[2148] It was revealed for SEQ ID NO: 838 that the amino acids at positions 8-10 are amino acids particularly important for the binding to IgE antibodies from allergic patients, and the amino acid at position 6 is an amino acid that influences the binding to IgE antibodies from allergic patients. The amino acids at positions 1-5 and 7 of SEQ ID NO: 838 had no influence on the binding activity against IgE antibodies from allergic patients when substituted by alanine.

[2149] For SEQ ID NO: 839, all the amino acids were amino acids particularly important for the binding to IgE antibodies from allergic patients.

[2150] (34β) Epitope of bifunctional UDP-glucose 4-epimerase and UDP-xylose 4-epimerase 1-like (spot 34α)

[2151] SEQ ID NOs: 842 and 843-846 were identified as epitopes of bifunctional UDP-glucose 4-epimerase and UDP-xylose 4-epimerase 1-like by the procedure of (B) mentioned above.

[2152] Amino acids important for binding to IgE antibodies from allergic patients were identified by the procedure of (C) mentioned above as to each of SEQ ID NOs: 842 and 843-846.

[2153] It was revealed for SEQ ID NO: 842 that the amino acids at positions 12, 13 and 15 are amino acids particularly important for the binding to IgE antibodies from allergic patients, and the amino acid at position 1 is an amino acid that influences the binding to IgE antibodies from allergic patients. The amino acids at positions 2-11 and 14 of SEQ ID NO: 842 had no influence on the binding activity against IgE antibodies from allergic patients when substituted by alanine.

[2154] For SEQ ID NOs: 843-846, all the amino acids were amino acids particularly important for the binding to IgE antibodies from allergic patients.

[2155] (35β) Epitope of Elongation Factor 1-Alpha (Spot 35α)

[2156] SEQ ID NOs: 849, 850, 853, and 856 were identified as epitopes of elongation factor 1-alpha by the procedure of (B) mentioned above.

[2157] Amino acids important for binding to IgE antibodies from allergic patients were identified by the procedure of (C) mentioned above as to each of SEQ ID NOs: 849, 850, 853 and 856.

[2158] It was revealed for SEQ ID NO: 849 that the amino acids at positions 5, 6, 10, 11 and 15 are amino acids particularly important for the binding to IgE antibodies from allergic patients, and the amino acids at positions 7 and 8 are amino acids that influence the binding to IgE antibodies from allergic patients. The amino acids at positions 1-4, 9 and 12-14 of SEQ ID NO: 849 had no influence on the binding activity against IgE antibodies from allergic patients when substituted by alanine.

[2159] It was revealed for SEQ ID NO: 853 that the amino acids at positions 1-3, 5 and 6 are amino acids particularly important for the binding to IgE antibodies from allergic patients, and the amino acid at position 4 is an amino acid that influences the binding to IgE antibodies from allergic patients. The amino acids at positions 7-9 of SEQ ID NO: 853 had no influence on the binding activity against IgE antibodies from allergic patients when substituted by alanine.

[2160] It was revealed for SEQ ID NO: 856 that the amino acids at positions 3, 5 and 6 are amino acids particularly important for the binding to IgE antibodies from allergic patients, and the amino acids at positions 1 and 2 are amino acids that influence the binding to IgE antibodies from allergic patients. The amino acids at positions 4 and 7-10 of SEQ ID NO: 856 had no influence on the binding activity against IgE antibodies from allergic patients when substituted by alanine.

[2161] For SEQ ID NO: 850, all the amino acids were amino acids particularly important for the binding to IgE antibodies from allergic patients.

[2162] (36β) Epitope of Seed Maturation Protein PM34 (Spots 36α and 37α)

[2163] SEQ ID NOs: 857, 858, and 861 were identified as epitopes of seed maturation protein PM34 by the procedure of (B) mentioned above.

[2164] Amino acids important for binding to IgE antibodies from allergic patients were identified by the procedure of (C) mentioned above as to each of SEQ ID NOs: 857, 858, and 861.

[2165] It was revealed for SEQ ID NO: 861 that the amino acids at positions 1 and 6-8 are amino acids particularly important for the binding to IgE antibodies from allergic patients, and the amino acid at position 5 is an amino acid that influences the binding to IgE antibodies from allergic patients. The amino acids at positions 2-4 of SEQ ID NO: 861 had no influence on the binding activity against IgE antibodies from allergic patients when substituted by alanine.

[2166] For SEQ ID NOs: 857 and 858, all the amino acids were amino acids particularly important for the binding to IgE antibodies from allergic patients.

[2167] (38β) Epitope of Seed Biotin-Containing Protein SBP65-Like Isoform X1 (Spot 38α)

[2168] SEQ ID NOs: 864, 867, 869, 871, 874, 877, 880, 882, 884, 887, 889, and 892 were identified as epitopes of seed biotin-containing protein SBP65-like isoform X1 by the procedure of (B) mentioned above.

[2169] Amino acids important for binding to IgE antibodies from allergic patients were identified by the procedure of (C) mentioned above as to each of SEQ ID NOs: 864, 867, 869, 871, 874, 877, 880, 882, 884, 887, 889, and 892.

[2170] It was revealed for SEQ ID NO: 864 that the amino acids at positions 1-3 are amino acids particularly important for the binding to IgE antibodies from allergic patients. The amino acids at positions 4-7 of SEQ ID NO: 864 had no influence on the binding activity against IgE antibodies from allergic patients when substituted by alanine.

[2171] It was revealed for SEQ ID NO: 867 that the amino acids at positions 2-4 are amino acids particularly important for the binding to IgE antibodies from allergic patients, and the amino acid at position 1 is an amino acid that influences the binding to IgE antibodies from allergic patients. The amino acids at positions 5-10 of SEQ ID NO: 867 had no influence on the binding activity against IgE antibodies from allergic patients when substituted by alanine.

[2172] It was revealed for SEQ ID NO: 869 that the amino acids at positions 1, 3 and 15 are amino acids particularly important for the binding to IgE antibodies from allergic patients. The amino acids at positions 2 and 4-14 of SEQ ID NO: 869 had no influence on the binding activity against IgE antibodies from allergic patients when substituted by alanine.

[2173] It was revealed for SEQ ID NO: 871 that the amino acids at positions 8, 9 and 15 are amino acids particularly important for the binding to IgE antibodies from allergic patients. The amino acids at positions 1-7 and 10-14 of SEQ ID NO: 871 had no influence on the binding activity against IgE antibodies from allergic patients when substituted by alanine.

[2174] It was revealed for SEQ ID NO: 874 that the amino acids at positions 4-8 and 10 are amino acids particularly important for the binding to IgE antibodies from allergic patients, and the amino acids at positions 1-3 are amino acids that influence the binding to IgE antibodies from allergic patients. The amino acid at position 9 of SEQ ID NO: 874 had no influence on the binding activity against IgE antibodies from allergic patients when substituted by alanine.

[2175] It was revealed for SEQ ID NO: 877 that the amino acids at positions 1-6, 9 and 10 are amino acids particularly important for the binding to IgE antibodies from allergic patients, and the amino acids at positions 7 and 8 are amino acids that influence the binding to IgE antibodies from allergic patients. The amino acids at positions 11-15 of SEQ ID NO: 877 had no influence on the binding activity against IgE antibodies from allergic patients when substituted by alanine.

[2176] It was revealed for SEQ ID NO: 880 that the amino acids at positions 2, 4-6, 8 and 9 are amino acids particularly important for the binding to IgE antibodies from allergic patients, and the amino acids at positions 7 and 12-15 are amino acids that influence the binding to IgE antibodies from allergic patients. The amino acids at positions 1, 3, 10 and 11 of SEQ ID NO: 880 had no influence on the binding activity against IgE antibodies from allergic patients when substituted by alanine.

[2177] It was revealed for SEQ ID NO: 882 that the amino acids at positions 1 and 5-9 are amino acids particularly important for the binding to IgE antibodies from allergic patients. The amino acids at positions 2-4 and 10 of SEQ ID NO: 882 had no influence on the binding activity against IgE antibodies from allergic patients when substituted by alanine.

[2178] It was revealed for SEQ ID NO: 884 that the amino acids at positions 5-10 are amino acids particularly important for the binding to IgE antibodies from allergic patients. The amino acids at positions 1-4 of SEQ ID NO: 884 had no influence on the binding activity against IgE antibodies from allergic patients when substituted by alanine.

[2179] It was revealed for SEQ ID NO: 887 that the amino acids at positions 2, 4, 5 and 14 are amino acids particularly important for the binding to IgE antibodies from allergic patients, and the amino acids at positions 6, 10, 12, 13 and 15 are amino acids that influence the binding to IgE antibodies from allergic patients. The amino acids at positions 1, 3, 7-9 and 11 of SEQ ID NO: 887 had no influence on the binding activity against IgE antibodies from allergic patients when substituted by alanine.

[2180] It was revealed for SEQ ID NO: 889 that the amino acids at positions 3-7 are amino acids particularly important for the binding to IgE antibodies from allergic patients. The amino acids at positions 1, 2 and 8-10 of SEQ ID NO: 889 had no influence on the binding activity against IgE antibodies from allergic patients when substituted by alanine.

[2181] It was revealed for SEQ ID NO: 892 that the amino acids at positions 5-10 are amino acids particularly important for the binding to IgE antibodies from allergic patients, and the amino acids at positions 3 and 4 are amino acids that influence the binding to IgE antibodies from allergic patients. The amino acids at positions 1 and 2 of SEQ ID NO: 892 had no influence on the binding activity against IgE antibodies from allergic patients when substituted by alanine.

[2182] (39β) Epitope of ATP Synthase Subunit O, Mitochondrial-Like (Spot 39α)

[2183] SEQ ID NO: 895 was identified as an epitope of ATP synthase subunit O, mitochondrial-like by the procedure of (B) mentioned above.

[2184] Amino acids important for binding to IgE antibodies from allergic patients were identified by the procedure of (C) mentioned above as to SEQ ID NO: 895.

[2185] It was revealed for SEQ ID NO: 895 that the amino acids at positions 2, 5, 7, and 12-14 are amino acids particularly important for the binding to IgE antibodies from allergic patients, and the amino acid at position 3 is an amino acid that influences the binding to IgE antibodies from allergic patients. The amino acids at positions 1, 4, 6, 8-11, and 15 of SEQ ID NO: 895 had no influence on the binding activity against IgE antibodies from allergic patients when substituted by alanine.

[2186] (40β) Epitope of P24 Oleosin Isoform A (Spots 40α and 56α)

[2187] SEQ ID NOs: 898, 899, and 902 were identified as epitopes of P24 oleosin isoform A by the procedure of (B) mentioned above.

[2188] Amino acids important for binding to IgE antibodies from allergic patients were identified by the procedure of (C) mentioned above as to each of SEQ ID NOs: 898, 899 and 902.

[2189] It was revealed for SEQ ID NO: 898 that the amino acids at positions 1, 2, 4 and 5 are amino acids particularly important for the binding to IgE antibodies from allergic patients, and the amino acid at position 6 is an amino acid that influences the binding to IgE antibodies from allergic patients. The amino acid at position 3 of SEQ ID NO: 898 had no influence on the binding activity against IgE antibodies from allergic patients when substituted by alanine.

[2190] It was revealed for SEQ ID NO: 902 that the amino acids at positions 6-8 are amino acids particularly important for the binding to IgE antibodies from allergic patients, and the amino acid at position 1 is an amino acid that influences the binding to IgE antibodies from allergic patients. The amino acids at positions 2-5 and 9 of SEQ ID NO: 902 had no influence on the binding activity against IgE antibodies from allergic patients when substituted by alanine.

[2191] For SEQ ID NO: 899, all the amino acids were amino acids particularly important for the binding to IgE antibodies from allergic patients.

[2192] (41β) Epitope of Uncharacterized Protein At3g49720-Like Isoform X2 (Spot 41α)

[2193] SEQ ID NO: 903 was identified as an epitope of uncharacterized protein At3g49720-like isoform X2 by the procedure of (B) mentioned above.

[2194] Amino acids important for binding to IgE antibodies from allergic patients were identified by the procedure of (C) mentioned above as to SEQ ID NO: 903.

[2195] For SEQ ID NO: 903, all the amino acids were amino acids particularly important for the binding to IgE antibodies from allergic patients.

[2196] (42β) Epitope of Superoxide Dismutase [Mn], Mitochondrial (Spots 42α and 43α)

[2197] SEQ ID NO: 906 was identified as an epitope of superoxide dismutase [Mn], mitochondrial by the procedure of (B) mentioned above.

[2198] Amino acids important for binding to IgE antibodies from allergic patients were identified by the procedure of (C) mentioned above as to SEQ ID NO: 906.

[2199] It was revealed for SEQ ID NO: 906 that the amino acids at positions 3 and 11-13 are amino acids particularly important for the binding to IgE antibodies from allergic patients, and the amino acids at positions 8 and 14 are amino acids that influence the binding to IgE antibodies from allergic patients. The amino acids at positions 1, 2, 4-7, 9, 10, and 15 of SEQ ID NO: 906 had no influence on the binding activity against IgE antibodies from allergic patients when substituted by alanine.

[2200] (44β) Epitope of Ferritin-2 (Spot 44α)

[2201] SEQ ID NO: 909 was identified as an epitope of Ferritin-2 by the procedure of (B) mentioned above.

[2202] Amino acids important for binding to IgE antibodies from allergic patients were identified by the procedure of (C) mentioned above as to SEQ ID NO: 909.

[2203] It was revealed for SEQ ID NO: 909 that the amino acids at positions 5-11 and 13-15 are amino acids particularly important for the binding to IgE antibodies from allergic patients. The amino acids at positions 1-4 and 12 of SEQ ID NO: 909 had no influence on the binding activity against IgE antibodies from allergic patients when substituted by alanine.

[2204] (45β) Epitope of Uncharacterized Protein LOC100499771 (Spot 45α)

[2205] SEQ ID NOs: 910-912 were identified as epitopes of uncharacterized protein LOC100499771 by the procedure of (B) mentioned above.

[2206] Amino acids important for binding to IgE antibodies from allergic patients were identified by the procedure of (C) mentioned above as to each of SEQ ID NOs: 910-912.

[2207] For SEQ ID NOs: 910-912, all the amino acids were amino acids particularly important for the binding to IgE antibodies from allergic patients.

[2208] (46β) Epitope of Seed Maturation Protein PM22 (Spot 46α)

[2209] SEQ ID NO: 915 was identified as an epitope of seed maturation protein PM22 by the procedure of (B) mentioned above.

[2210] Amino acids important for binding to IgE antibodies from allergic patients were identified by the procedure of (C) mentioned above as to SEQ ID NO: 915.

[2211] It was revealed for SEQ ID NO: 915 that the amino acids at positions 2, 4, and 8 are amino acids particularly important for the binding to IgE antibodies from allergic patients, and the amino acid at position 3 is an amino acid that influences the binding to IgE antibodies from allergic patients. The amino acids at positions 1, 5-7, and 9 of SEQ ID NO: 915 had no influence on the binding activity against IgE antibodies from allergic patients when substituted by alanine.

[2212] (47β) Epitope of Eukaryotic Translation Initiation Factor 5A-2 (Spot 47α)

[2213] SEQ ID NOs: 916-918 were identified as epitopes of eukaryotic translation initiation factor 5A-2 by the procedure of (B) mentioned above.

[2214] Amino acids important for binding to IgE antibodies from allergic patients were identified by the procedure of (C) mentioned above as to each of SEQ ID NOs: 916-918.

[2215] For SEQ ID NOs: 916-918, all the amino acids were amino acids particularly important for the binding to IgE antibodies from allergic patients.

[2216] (48β) Epitope of Uncharacterized Protein LOC100306570 (Spot 48α)

[2217] SEQ ID NOs: 921 and 922 were identified as epitopes of uncharacterized protein LOC100306570 by the procedure of (B) mentioned above.

[2218] Amino acids important for binding to IgE antibodies from allergic patients were identified by the procedure of (C) mentioned above as to each of SEQ ID NOs: 921 and 922.

[2219] It was revealed for SEQ ID NO: 921 that the amino acids at positions 7-9 are amino acids particularly important for the binding to IgE antibodies from allergic patients, and the amino acid at position 5 is an amino acid that influences the binding to IgE antibodies from allergic patients. The amino acids at positions 1-4 and 6 of SEQ ID NO: 921 had no influence on the binding activity against IgE antibodies from allergic patients when substituted by alanine.

[2220] For SEQ ID NO: 922, all the amino acids were amino acids particularly important for the binding to IgE antibodies from allergic patients.

[2221] (49β) Epitope of Bowman-Birk Type Proteinase Inhibitor D-II (Spot 49α)

[2222] SEQ ID NO: 923 was identified as an epitope of Bowman-Birk type proteinase inhibitor D-II by the procedure of (B) mentioned above.

[2223] Amino acids important for binding to IgE antibodies from allergic patients were identified by the procedure of (C) mentioned above as to SEQ ID NO: 923.

[2224] For SEQ ID NO: 923, all the amino acids were amino acids particularly important for the binding to IgE antibodies from allergic patients.

[2225] (50β) Epitope of Uncharacterized Protein LOC100813859 (Spot 50α)

[2226] SEQ ID NOs: 924 and 927 were identified as epitopes of uncharacterized protein LOC100813859 by the procedure of (B) mentioned above.

[2227] Amino acids important for binding to IgE antibodies from allergic patients were identified by the procedure of (C) mentioned above as to each of SEQ ID NOs: 924 and 927.

[2228] It was revealed for SEQ ID NO: 927 that the amino acids at positions 5 and 6 are amino acids particularly important for the binding to IgE antibodies from allergic patients, and the amino acid at position 3 is an amino acid that influences the binding to IgE antibodies from allergic patients. The amino acids at positions 1, 2, 4, and 7-9 of SEQ ID NO: 927 had no influence on the binding activity against IgE antibodies from allergic patients when substituted by alanine.

[2229] For SEQ ID NO: 924, all the amino acids were amino acids particularly important for the binding to IgE antibodies from allergic patients.

[2230] (51β) Epitope of 14-3-3-Like Protein (Spot 51α)

[2231] SEQ ID NOs: 928-930 were identified as epitopes of 14-3-3-like protein by the procedure of (B) mentioned above.

[2232] Amino acids important for binding to IgE antibodies from allergic patients were identified by the procedure of (C) mentioned above as to each of SEQ ID NOs: 928-930.

[2233] For SEQ ID NOs: 928-930, all the amino acids were amino acids particularly important for the binding to IgE antibodies from allergic patients.

[2234] (52β) Epitope of probable fructokinase-4 (Spot 52α)

[2235] SEQ ID NOs: 933 and 934-938 were identified as epitopes of probable fructokinase-4 by the procedure of (B) mentioned above.

[2236] Amino acids important for binding to IgE antibodies from allergic patients were identified by the procedure of (C) mentioned above as to each of SEQ ID NOs: 933 and 934-938.

[2237] It was revealed for SEQ ID NO: 933 that the amino acids at positions 7, 10, and 12 are amino acids particularly important for the binding to IgE antibodies from allergic patients, and the amino acid at position 3 is an amino acid that influences the binding to IgE antibodies from allergic patients. The amino acids at positions 1, 2, 4-6, 8, 9, 11, and 13-15 of SEQ ID NO: 933 had no influence on the binding activity against IgE antibodies from allergic patients when substituted by alanine.

[2238] For SEQ ID NOs: 934-938, all the amino acids were amino acids particularly important for the binding to IgE antibodies from allergic patients.

[2239] (53β) Epitope of triosephosphate isomerase isoform X1 (Spot 53α)

[2240] SEQ ID NO: 939 was identified as an epitope of triosephosphate isomerase isoform X1 by the procedure of (B) mentioned above.

[2241] Amino acids important for binding to IgE antibodies from allergic patients were identified by the procedure of (C) mentioned above as to SEQ ID NO: 939.

[2242] For SEQ ID NO: 939, all the amino acids were amino acids particularly important for the binding to IgE antibodies from allergic patients.

[2243] (54β) Epitope of Superoxide Dismutase [Fe], Chloroplastic Isoform X1 (Spot 54α)

[2244] SEQ ID NOs: 940 and 943 were identified as epitopes of superoxide dismutase [Fe], chloroplastic isoform X1 by the procedure of (B) mentioned above.

[2245] Amino acids important for binding to IgE antibodies from allergic patients were identified by the procedure of (C) mentioned above as to each of SEQ ID NOs: 940 and 943.

[2246] It was revealed for SEQ ID NO: 943 that the amino acids at positions 1 and 6 are amino acids particularly important for the binding to IgE antibodies from allergic patients, and the amino acid at position 7 is an amino acid that influences the binding to IgE antibodies from allergic patients. The amino acids at positions 2-5 of SEQ ID NO: 943 had no influence on the binding activity against IgE antibodies from allergic patients when substituted by alanine.

[2247] For SEQ ID NO: 940, all the amino acids were amino acids particularly important for the binding to IgE antibodies from allergic patients.

[2248] (55β) Epitope of 51 kDa Seed Maturation Protein Precursor (Spot 55α)

[2249] SEQ ID NOs: 946, 949, and 952 were identified as epitopes of 51 kDa seed maturation protein precursor by the procedure of (B) mentioned above.

[2250] Amino acids important for binding to IgE antibodies from allergic patients were identified by the procedure of (C) mentioned above as to each of SEQ ID NOs: 946, 949, and 952.

[2251] It was revealed for SEQ ID NO: 946 that the amino acids at positions 1, 2, 6, and 7 are amino acids particularly important for the binding to IgE antibodies from allergic patients, and the amino acid at position 3 is an amino acid that influences the binding to IgE antibodies from allergic patients. The amino acids at positions 4, 5, 8, and 9 of SEQ ID NO: 946 had no influence on the binding activity against IgE antibodies from allergic patients when substituted by alanine.

[2252] It was revealed for SEQ ID NO: 949 that the amino acids at positions 1-3, 7, and 8 are amino acids particularly important for the binding to IgE antibodies from allergic patients, and the amino acid at position 4 is an amino acid that influences the binding to IgE antibodies from allergic patients. The amino acids at positions 5 and 6 of SEQ ID NO: 949 had no influence on the binding activity against IgE antibodies from allergic patients when substituted by alanine.

[2253] It was revealed for SEQ ID NO: 952 that the amino acids at positions 1, 2, and 9 are amino acids particularly important for the binding to IgE antibodies from allergic patients, and the amino acid at position 8 is an amino acid that influences the binding to IgE antibodies from allergic patients. The amino acids at positions 3-7 of SEQ ID NO: 952 had no influence on the binding activity against IgE antibodies from allergic patients when substituted by alanine.

### Example 5

### Identification of Epitopes (2)

[2254] Identification of epitopes was carried out by the same procedure as in Example 4 as to each of the following antigen proteins.

[2255] (57β) Epitope of Gly m 4 (UniProt Accession Number: P26987.1)

[2256] SEQ ID NO: 955 was identified as an epitope of Gly m 4 by the procedure of (B) of Example 4.

[2257] Amino acids important for binding to IgE antibodies from allergic patients were identified by the procedure of (C) of Example 4 as to SEQ ID NO: 955.

[2258] It was revealed for SEQ ID NO: 955 that the amino acids at positions 8, 10, 12, 14, and 15 are amino acids particularly important for the binding to IgE antibodies from allergic patients, and the amino acids at positions 7, 9, 11, and 13 are amino acids that influence the binding to IgE antibodies from allergic patients. The amino acids at positions 1-6 of SEQ ID NO: 955 had no influence on the binding activity against IgE antibodies from allergic patients when substituted by alanine.

[2259] (58β) Epitopes of Gly m 5α (NCBI Accession Number: NP_001236856.1) and Gly m 5α′ (NCBI Accession Number: NP 001237316.1)

[2260] SEQ ID NOs: 956-960 were identified as epitopes of Gly m 5α or Gly m 5α′ by the procedure of (B) of Example 4.

[2261] Amino acids important for binding to IgE antibodies from allergic patients were identified by the procedure of (C) of Example 4 as to each of SEQ ID NOs: 956-960.

[2262] For SEQ ID NOs: 956-960, all the amino acids were amino acids particularly important for the binding to IgE antibodies from allergic patients.

[2263] (59β) Epitopes of Gly m 6.01 (UniProt Accession Number: CAA33215.1) and Gly m 6.02 (UniProt Accession Number: BAA00154.1)

[2264] SEQ ID NOs: 961 and 962 were identified as epitopes of Gly m 6.01 or Gly m 6.02 by the procedure of (B) of Example 4.

[2265] Amino acids important for binding to IgE antibodies from allergic patients were identified by the procedure of (C) of Example 4 as to each of SEQ ID NOs: 961 and 962.

[2266] For SEQ ID NOs: 961 and 962, all the amino acids were amino acids particularly important for the binding to IgE antibodies from allergic patients.

[2267] (60β) Epitope of Gly m 8 (UniProt Accession Number: AAB71140.1)

[2268] SEQ ID NO: 963 was identified as an epitope of Gly m 8 by the procedure of (B) of Example 4.

[2269] Amino acids important for binding to IgE antibodies from allergic patients were identified by the procedure of (C) of Example 4 as to SEQ ID NO: 963.

[2270] For SEQ ID NO: 963, all the amino acids were amino acids particularly important for the binding to IgE antibodies from allergic patients.

### Example 6

### Study on Cross-Reactivity

[2271] Amino acids important for binding activity against IgE antibodies from allergic patients were identified as to SEQ ID NO: 871, one of the polypeptides in spot 3813, to obtain SEQ ID NO: 870 (hereinafter also referred to as a key sequence). A protein having this key sequence was compared against NCBI protein data and analyzed by PHI-BLAST. As a result, peach-derived kinesin-like protein KIN-7C comprising SEQ ID NO: 984 was identified as an amino acid sequence corresponding to the key sequence, and apple-derived uncharacterized protein LOC103433727 isoform X2 comprising SEQ ID NO: 985 was identified as an amino acid sequence corresponding to the key sequence.

[2272] The binding activity of peptides comprising the amino acid sequences of SEQ ID NOs: 871, 984 and 985 against an IgE antibody from one patient having allergies to a soybean, a peach and an apple was confirmed by ELISA. The peptides were synthesized such that the peptides were N-terminally biotinylated by the Fmoc method.

[2273] To be specific, ELISA was carried out according to the following procedure.
[2274] (1) The concentrations of the biotinylated peptides were adjusted to 1 μg/mL with PBST.
[2275] (2) Each peptide solution was added at 40 μL to each well of a 384-well plate coated with streptavidin, and shaken at room temperature for one hour. After collection of the solution, the wells were washed with PBS five times.
[2276] (3) A 1:5 dilution of Blocking one (diluted with MQ) was added at 40 μL thereto and shaken at room temperature for 15 minutes. After removal of the solution, the wells were washed with PBS five times.
[2277] (4) A diluted serum solution (1:10, diluting solution: Blocking one produced by Nacalai Tesque, Inc.) was added at 40 μL thereto and shaken at room temperature for one hour. After removal of the solution, the wells were washed with PBS five times.
[2278] (5) A diluted secondary antibody solution (1:5000, diluting solution: Blocking one produced by Nacalai Tesque, Inc.) was added at 40 μL thereto and shaken at room temperature for one hour. After removal of the solution, the wells were washed with PBS five times.
[2279] (6) 1-Step Ultra TMB-ELISA (Thermo Fisher Scientific) was added at 40 μL thereto and shaken at room temperature for 15 minutes.
[2280] (7) 2 M H₂SO₄ was added at 40 μL thereto. Absorbance at 450 nm was measured.

[2281] The results are shown in FIG. 6. As shown in FIG. 6, the peptides comprising the amino acid sequences of SEQ ID NOs: 871, 984 and 985 exhibited binding activity against the IgE antibody from the patient having allergies to a soybean, a peach and an apple. Also, these peptides bound more strongly to the IgE antibody from the allergic patient than to an IgE antibody from a healthy subject who was not an allergic patient. This indicates that this key sequence can be used for detecting the cross-reactivity of an allergen.

[2282] This result also indicates that the polypeptides (1β) to (60β) of the present invention can also be used for the detection of the cross-reactivity of an allergen.

The application's sequence listing, which the Patent Office published only in electronic form, follows.

SEQUENCE LISTING (985 sequences)

SEQ ID NO: 1 - DNA, 249 bp, Glycine max
atgtgtattctgagcttcctcaaaagtgatcagtcatcaagttatgatgatgatgagtattcaaaaccatgctgtgatctctgcatgtgcacacgctcaatgcctcctcaatgcagctgtgaagatattaggctgaattcatgccactcagattgtaagagctgtatgtgcacacgctcacagccaggacagtgtcgttgtcttgacaccaacgacttctgctacaaaccttgcaagtccagagatgac

SEQ ID NO: 2 - protein, 83 aa, Glycine max
MCILSFLKSDQSSSYDDDEYSKPCCDLCMCTRSMPPQCSCEDIRLNSCHSDCKSCMCTRSQPGQCRCLDTNDFCYKPCKSRDD

SEQ ID NO: 3 - DNA, 1425 bp, Glycine max
atgtcaccacaaacagagactaaagcaagtgttgggttcaaagctggtgttaaagattataaattgacttattatactcctgactatgaaaccaaagatactgatatcttggcagcattccgagtaactcctcaaccaggagttccgcctgaagaagcaggtgccgcggtagccgccgaatcttctactggtacatggacaactgtgtggaccgatgggcttaccagtcttgatcgttacaaagggcgatgctacggccttgaacctgttgctggggaagaaaatcaatatattgcttatgtagcttatcccttagacctttttgaagaaggttctgttactaacatgtttacttccattgtcggtaatgtatttgggttcaaggccctgcgtgctctacgtctggaggatttgcgaatccctactgcttatattaaaactttccaaggtccgcctcatggcatccaagttgagagagataaattgaacaagtatggtcgtcccctattaggatgtactattaaacctaaattggggttatccgctaagaattatggtagagctgtttatgaatgtcttcgtgggggacttgattttaccaaagatgatgaaaatgtgaattcccaaccatttatgcgttggagagaccgtttcttattttgtgccgaagccatttttaaatcacaggctgaaacaggtgaaatcaaagggcattacttgaatgcaactgcgggtacatgcgaagaaatgatgaaaagagctgtatttgccagagaattaggcgttcctatcgtaatgcatgattatttaacggggggattcactgcaaatactagcttggctcattattgccgagataatggtctacttcttcatatacaccgtgcaatgcatgcagttatcgacagacaaaagaatcatggtatgcactttcgtgtactagctaaagcattacgtttgtctggtggagatcatgttcacgccggtaccgtagtaggtaaacttgaaggggaaagagaaatcactttaggttttgttgatttactacgtgatgattttgttgaaaaagatcgaagtcgcggtatttatttcactcaggattgggtttctctaccaggtgttttgcctgtagcttcgggaggtattcacgtttggcatatgcctgctctgaccgagatctttggggatgattctgtactccaatttggcggaggaactttaggacacccttggggaaatgcaccaggtgctgtagctaatcgagtagctcttgaagcatgtgtgcaggctcgaaatgaaggacgcgatcttgctcgtgaaggtaatgaaattatccgtgaggctagcaaatggagtcctgaattagctgctgcttgtgaagtatggaaggagatcaaatttgaattcgaagcaatggatactttg

SEQ ID NO: 4 - protein, 475 aa, Glycine max
MSPQTETKASVGFKAGVKDYKLTYYTPDYETKDTDILAAFRVTPQPGVPPEEAGAAVAAESSTGTWTTVWTDGLTSLDRYKGRCYGLEPVAGEENQYIAYVAYPLDLFEEGSVTNMFTSIVGNVFGFKALRALRLEDLRIPTAYIKTFQGPPHGIQVERDKLNKYGRPLLGCTIKPKLGLSAKNYGRAVYECLRGGLDFTKDDENVNSQPFMRWRDRFLFCAEAIFKSQAETGEIKGHYLNATAGTCEEMMKRAVFARELGVPIVMHDYLTGGFTANTSLAHYCRDNGLLLHIHRAMHAVIDRQKNHGMHFRVLAKALRLSGGDHVHAGTVVGKLEGEREITLGFVDLLRDDFVEKDRSRGIYFTQDWVSLPGVLPVASGGIHVWHMPALTEIFGDDSVLQFGGGTLGHPWGNAPGAVANRVALEACVQARNEGRDLAREGNEIIREASKWSPELAAACEVWKEIKFEFEAMDTL

SEQ ID NO: 5 - DNA, 1026 bp, Glycine max
atgccaaacgacagcgttctgagtcttttcttcttcgttaccctcttcacatgccttctctctgctacttcccacgatgaccatattttcctaccgagtcaactccatgacgatgactcagtgagttgcactgcaaccgacccaagccttaactacaagccggtgatcggaatcctgacccaccccggcgacggtgcctctggccggctcagcaacgccaccggggtttcttacatcgccgcctcctacgttaaattcgtggagtccggtggtgctagagttattccccttatctacaatgagtcacctgagaaccttaacaagaagctcgatttggtcaatggagtgctcttcactggtgggtgggctgtttctggtccatatttggatactcttggaaacatttttaagaaagctttagagagaaatgatgctggagaccatttcccagtaattgccttcaacttaggtggaaacctcgtaataaggatcgtaagcgagcaaactgatattcttgaaccatttactgcgtcgagtttgccaagttctcttgtattgtggaacgaagcaaatgctaaaggaagtctatttcaaagatttccttcagatttgttgacacagctgaagacagattgtctcgtcctgcacaatcatcgttatgccatatccccacgcaagcttcaatataataccaagttatctgacttttttgagattctggcaacatctggggatagagatggaaagactttcgtttccacagcacgtggtaggaaatatcccgtgactgtcaacctatggcaaccagagaaaaatgcgtttgagtgggctacatctttgaaagcccctcacacagaggatgcaattcgggttactcagtccacagcaaactttttcataagtgaagctaggaaatccacaaacacacctgatgctcaaaaagtgcgagatagtctcatctacaattacaaacctacttttggtggaacggctgggaaaggatatgatcaagtgtatctctttgaa

SEQ ID NO: 6 - protein, 342 aa, Glycine max
MPNDSVLSLFFFVTLFTCLLSATSHDDHIFLPSQLHDDDSVSCTATDPSLNYKPVIGILTHPGDGASGRLSNATGVSYIAASYVKFVESGGARVIPLIYNESPENLNKKLDLVNGVLFTGGWAVSGPYLDTLGNIFKKALERNDAGDHFPVIAFNLGGNLVIRIVSEQTDILEPFTASSLPSSLVLWNEANAKGSLFQRFPSDLLTQLKTDCLVLHNHRYAISPRKLQYNTKLSDFFEILATSGDRDGKTFVSTARGRKYPVTVNLWQPEKNAFEWATSLKAPHTEDAIRVTQSTANFFISEARKSTNTPDAQKVRDSLIYNYKPTFGGTAGKGYDQVYLFE

SEQ ID NO: 7 - DNA, 975 bp, Glycine max
atggcggaaggactcgtcctgaagggaaccatgcgcgcccacaccgacgtcgtgacggcgattgccactcccatcgacaactccgacatgatcgtgacggcgtcgcgcgacagatccatcattctctggcacctcaccaaggaggacaagacctacggtgtcccccgccgccgcctcaccggacattctcacttcgtccaggacgtcgtcctctcatccgacggtcagttcgccctctccggctcctgggacggcgagctccgcctctgggacctcgcggctggcacctctgcccgccgcttcgttggccacaccaaggacgtgctctccgtggcgttctccatcgacaaccgtcagatcgtgtcggcctctcgtgaccgcacgatcaagctgtggaacaccctgggtgagtgcaagtacacaatccaagatggcgatgcgcattcggattgggtaagttgcgtccgtttcagccctagcactcttcagccaaccattgtttctgcttcatgggacaggaccgttaaggtttggaacctgaccaactgcaagctgaggaacacccttgctggacacaatgggtatgtgaatactgttgctgtttcccctgatggctctctctgtgccagtggtggcaaagatggggttattcttctgtgggatttggctgagggtaagcgtctttactctctcgatgctggctcaatcatccatgcactctgcttcagccccagcaggtactggctctgcgccgccaccgagcagagcatcaagatctgggatttggagagcaagagtatcgttgaggatttgaaggttgacctcaagactgaggctgatgccacctccggtggtggtaacgccaacaagaagaaggttatttattgcacaagtttgaactggagtgcggatggaagcactttgtttagtggctataccgatggtgtggccagagtttgggctattggacgttat

SEQ ID NO: 8 - protein, 325 aa, Glycine max
MAEGLVLKGTMRAHTDVVTAIATPIDNSDMIVTASRDRSIILWHLTKEDKTYGVPRRRLTGHSHFVQDVVLSSDGQFALSGSWDGELRLWDLAAGTSARRFVGHTKDVLSVAFSIDNRQIVSASRDRTIKLWNTLGECKYTIQDGDAHSDWVSCVRFSPSTLQPTIVSASWDRTVKVWNLTNCKLRNTLAGHNGYVNTVAVSPDGSLCASGGKDGVILLWDLAEGKRLYSLDAGSIIHALCFSPSRYWLCAATEQSIKIWDLESKSIVEDLKVDLKTEADATSGGGNANKKKVIYCTSLNWSADGSTLFSGYTDGVARVWAIGRY

SEQ ID NO: 9 - DNA, 303 bp, Glycine max
atggcatctcatcaacaaaacaagcaagagcttgatgaaagggcaaggcaaggagagactgttgttccgggtggcactggtggcaagagccttgaggctcagcaacatcttgctgaaggaaggagcaggggagggaaaacaaggaaggagcagctggggacagaagggtaccatgaaatgggacgcaaaggtgggttgagcactatggacaagtcaggagaagaacgtgctcaagaggaagccattgacatcgatgagtccaagttcaggactggtaataaccaagacaagaaccagaacaag

SEQ ID NO: 10 - protein, 101 aa, Glycine max
MASHQQNKQELDERARQGETVVPGGTGGKSLEAQQHLAEGRSRGGKTRKEQLGTEGYHEMGRKGGLSTMDKSGEERAQEEAIDIDESKFRTGNNQDKNQNK

SEQ ID NO: 11 - DNA, 1929 bp, Glycine max
atggcgtctgaacaattggctcgcagagagaacaccaccaccgagaaggagattcacgttgagaaacacagggttcccaagatggccacccacttcgagcaccttgcggagcaagctaaagaatctgacatcaccgctgggaaggatactccgcagggtagcatagaagccttgcaagctggagagagggtcaaagatcatgcaggaaaagccatgggagatattggtggacgtgggaaagccagagagactcacgagctgggtgcacactttgaatccctggctgacaaagtaactgaccatgcagcagccaatgtagttggaaacaaagagagtcaaagagaagctcgtggtggtgttcgtgatgttgggaagttcgaaatgagaactgaagggggagaaaaaggaaacaaggatagaccagaactgaaaacacgaaccagagaggtaataggaagaacggagaaagaaagaggaagagaaagtggaggacaagtagtggcagagaaaggaagagaaacagaaactgcaaggggaagggttggtgctgaaaatgaaggtgcaagaacaaccgctgttataacttgcacgttggaaaaaggtggtggtactcagaaaccaataagagaagaagagagagagagtgaaagtgaaagatcagcgtgggaacagatttccaactacagtgatcaagccacacaaggtgtgaaggaaaagtacgagagagcaaagcaagcagcaagcgagacactgaacaccacaacacaaaccgcacaagagaaaagcgcacaggcaaagaatcttgcagcacaagcaaaggacgcaacgttagagaagggtcagcaaggctatgctgtgacaaaggacaccatttcaagtgcagcgaaaaccgcttcggagaaaactgcgccagtggcagagaaggccaaagactacactcttcaggctgcggagaaggccaagagtgcgggtggcacaacggcgagttacgtcggagagaaagcggtgcaggccaaggatgtcgccgtggagagtgggaagagtgcggctgggtatgctgccaaggtggctgctgatttgagggacaaggccaccgcggtggggtgggccgcggcccatttttcggcggaaaagacggtggaagggaccaaggccgccgcccatgttgtcgagggagcggccgggtatgccggacataaggccgcggagcttgcttcgatgtcggccggtgctgttaaagggctggctgcttctgctggtgagactgctaaggaatacaccgcaaagaagaaagaggaggcacagcgggaattggaggccaaaaaaccatctcaacctcaggaagctgaagagaggccatcagaaggaattggcgaaactgtgaggcagtatgcacaaaaaccaaagccaagtgaaggaaaccctcagaaggagggaaccggaagcatcgtgtttacagcaataggcgaaacagtaagcagtgccggtgagaaggtaaagaaaccgtttaaaaacactatgggaggagaaagtgaaggaggaggagggaaagaagagggaaagagtgtcattggtaaaagtttgaccagcattggtgagaagctgggtgatgcaaaacagagagaggagctgttagacaacgtcactggcaacatcaccgagggaggaggcgaggtgttgggagcagtaggtgaaaccgttgctgagattggacagaacatgatgaagccagcggagatagttcaggaacgcgctcacgttcgacaagcgggtggggtcttggatgccattggtgaaaccattgctgagattgctgaaacgactcgagtcatggtttctggagaggacgagagagtgctgaggcagagcgtggtgttggagactcgcgtaactggtcgtgccaagcatgaagaagggtcgcacggtgct

SEQ ID NO: 12 - protein, 643 aa, Glycine max
MASEQLARRENTTTEKEIHVEKHRVPKMATHFEHLAEQAKESDITAGKDTPQGSIEALQAGERVKDHAGKAMGDIGGRGKARETHELGAHFESLADKVTDHAAANVVGNKESQREARGGVRDVGKFEMRTEGGEKGNKDRPELKTRTREVIGRTEKERGRESGGQVVAEKGRETETARGRVGAENEGARTTAVITCTLEKGGGTQKPIREEERESESERSAWEQISNYSDQATQGVKEKYERAKQAASETLNTTTQTAQEKSAQAKNLAAQAKDATLEKGQQGYAVTKDTISSAAKTASEKTAPVAEKAKDYTLQAAEKAKSAGGTTASYVGEKAVQAKDVAVESGKSAAGYAAKVAADLRDKATAVGWAAAHFSAEKTVEGTKAAAHVVEGAAGYAGHKAAELASMSAGAVKGLAASAGETAKEYTAKKKEEAQRELEAKKPSQPQEAEERPSEGIGETVRQYAQKPKPSEGNPQKEGTGSIVFTAIGETVSSAGEKVKKPFKNTMGGESEGGGGKEEGKSVIGKSLTSIGEKLGDAKQREELLDNVTGNITEGGGEVLGAVGETVAEIGQNMMKPAEIVQERAHVRQAGGVLDAIGETIAEIAETTRVMVSGEDERVLRQSVVLETRVTGRAKHEEGSHGA

SEQ ID NO: 13 - DNA, 771 bp, Glycine max
  misc_feature (242)..(242): n is a, c, g, or t
atggccctttcttgctccaaagttttaagcttttatctctcgcccgttgtgggtggtggtgatgttccgaaaaagctcactttttcttcttttttgggtctttctaagggtgttggtggaagcaggagctcgagggtgtgtgctgcttcaaatgcacccgcaccactcgctggggtcatatttgaaccatttcaagagctcaagaaggattatcttgctgttccgattgcacacaatgtttncttggctcgtcagaactatgcagatgactctgaatctgcaatcaacgagcagatcaatgtggaatacaacgtttcctatgtgtaccacgccttgtttgcgtacttcgacagagacaacatagctctcaaaggacttgcaaagttcttcaaggaatcaagtgaagaagaaagagagcatgccgagcagcttataaagtatcagaacattcgtggtggacgagtggtgctgcacccaatcacaagtcctccctcggaatttgagcattcggaaaaaggggatgccttgtatgccatggaactagctttgtctttggagaagttgacgaatgagaaacttctgcacgttcacagtgtggcagaacgtaacaatgatcctcaaytdgcagacttcattgagagcgagttcttgtatgagcaggttaaatcgattaaaaagattgcagagtatgtggctcaactgagattagttggaaagggtcatggtgtgtggcactttgatcaaaagcttcttcacgatgaagatcatgta

SEQ ID NO: 14 - protein, 257 aa, Glycine max
  misc_feature (81)..(81): Xaa can be any amino acid
  misc_feature (208)..(208): Xaa can be any amino acid
MALSCSKVLSFYLSPVVGGGDVPKKLTFSSFLGLSKGVGGSRSSRVCAASNAPAPLAGVIFEPFQELKKDYLAVPIAHNVXLARQNYADDSESAINEQINVEYNVSYVYHALFAYFDRDNIALKGLAKFFKESSEEEREHAEQLIKYQNIRGGRVVLHPITSPPSEFEHSEKGDALYAMELALSLEKLTNEKLLHVHSVAERNNDPQXADFIESEFLYEQVKSIKKIAEYVAQLRLVGKGHGVWHFDQKLLHDEDHV

SEQ ID NO: 15 - DNA, 2421 bp, Glycine max
atgtctcagcaaggcgaatcatcggacccgaaatcggggaagaaggacttctcaaccgcgattctggaacgcaaaaagtcgccgaaccggcttgtcgtggatgaggctgtcaacgacgacaactccgtggtcaccatgcatccccaaaccatggaaaagcttcagcttttccgaggggacactatcctcatcaagggtaagaaacggaaggataccatttgcatagctcttgctgatgagaactgtgaggagccgaagatcaggatgaataaagttgtgaggtcaaatttgcgggttcggcttggagatgttgtgtctgtgcaccagtgcccggatgttaaatatgggaaacgtgtgcacattctgcctattgatgataccattgaaggtgtcactggcaatctgtttgatgctttcttgaaaccctatttcttggaagcttaccgtcctgtcagaaaaggagatctatttcttgtccggggagggatgagaagtgtagagttcaaggtggttgaaaccgatcctggagaatattgtgttgttgctccagacactgaaattttctgtgagggggagcctttgaaaagagaagatgaagagagactggatgaagtcgggtatgatgatgtgggtggtgtcaggaaacaaatggctcagattcgtgagttggttgagcttccattgaggcatccacagctttttaaatcaattggtgtgaaaccacccaaaggaattttactttatggacccccaggttctgggaagacattaatagcaagagctgtagctaatgaaactggagcttttttcttttgtattaacggaccagagattatgtccaaacttgctggagagagtgaaagcaatctcaggaaagcgtttgaagaagcagaaaagaatgcaccatccattatcttcattgatgaaattgattccattgcccccaagcgggagaagacacatggtgaagttgaaaggaggattgtttcacaacttttgactcttatggatggattaaaatctcgtgctcatgttattgttattggagctactaatcgtccaaatagcattgacccagcattgagaaggtttggtagatttgatagggaaattgatattggtgttcccgatgaagttgggagacttgaagtccttcgcatacatactaaaaacatgaagctatctgatgatgttgatttagagagaattgcaaaagatactcatgggtatgttggtgctgaccttgctgccctttgcactgaagctgctttgcaatgcattagggagaagatggatgtaattgacttggaggatgagactattgatgcagaagtactgaattccatggcagttacaaatgagcatttccagactgcccttggaacaagcaacccatcagctttacgtgaaactgttgttgaagtgcctaatgtcagctgggaagacattggaggccttgaaaatgtcaagcgtgaactgcaagagactgtacaatatccagttgagcacccagaaaagtttgagaagtttggtatgtctccatctaaaggagtacttttctatggtcctccaggatgtgggaaaactttgttagccaaagcaattgctaatgaatgtcaagctaacttcatcagtgtgaaaggtccagaattgcttacaatgtggtttggtgaaagtgaagctaatgttagagaaatttttgacaaggccagacaatcggctccatgtgtcctcttctttgatgagcttgactctattgccactcagagaggaagcagtgttggggatgctggtggtgcggctgatagagttctaaatcaacttttgactgaaatggatggcatgtctgccaaaaagactgtgttcataattggggcaactaacagacctgacatcattgacccagcacttcttcgaccaggccgtctggatcaattgatctatattcctctccctgatgaggattcccggcatcaaatctttaaagcctgcttgaggaagtcacctatcgcaaaaaatgttgatttgagagcattggctaggcacactcaagggttcagtggtgctgatattacagaaatatgccagcgagcatgcaaatatgccataagagaaaacatagagaaggacattgagcgagagaggaagagtagggaaaaccctgaggccatggatgaagataccgtcgacgacgaagttgcggagatcaaggctgctcattttgaggagtcaatgaagtttgcacggaggagtgttagtgatgctgatattcgcaagtatcaggcatttgctcagaccttacagcaatcaagagggtttggaagtgaatttaggtttccagagtctggagataggactactactggatctgacccctttgcagcttctgctggtggggctgacgaagatgatctatatagt

SEQ ID NO: 16 - protein, 807 aa, Glycine max
MSQQGESSDPKSGKKDFSTAILERKKSPNRLVVDEAVNDDNSVVTMHPQTMEKLQLFRGDTILIKGKKRKDTICIALADENCEEPKIRMNKVVRSNLRVRLGDVVSVHQCPDVKYGKRVHILPIDDTIEGVTGNLFDAFLKPYFLEAYRPVRKGDLFLVRGGMRSVEFKVVETDPGEYCVVAPDTEIFCEGEPLKREDEERLDEVGYDDVGGVRKQMAQIRELVELPLRHPQLFKSIGVKPPKGILLYGPPGSGKTLIARAVANETGAFFFCINGPEIMSKLAGESESNLRKAFEEAEKNAPSIIFIDEIDSIAPKREKTHGEVERRIVSQLLTLMDGLKSRAHVIVIGATNRPNSIDPALRRFGRFDREIDIGVPDEVGRLEVLRIHTKNMKLSDDVDLERIAKDTHGYVGADLAALCTEAALQCIREKMDVIDLEDETIDAEVLNSMAVTNEHFQTALGTSNPSALRETVVEVPNVSWEDIGGLENVKRELQETVQYPVEHPEKFEKFGMSPSKGVLFYGPPGCGKTLLAKAIANECQANFISVKGPELLTMWFGESEANVREIFDKARQSAPCVLFFDELDSIATQRGSSVGDAGGAADRVLNQLLTEMDGMSAKKTVFIIGATNRPDIIDPALLRPGRLDQLIYIPLPDEDSRHQIFKACLRKSPIAKNVDLRALARHTQGFSGADITEICQRACKYAIRENIEKDIERERKSRENPEAMDEDTVDDEVAEIKAAHFEESMKFARRSVSDADIRKYQAFAQTLQQSRGFGSEFRFPESGDRTTTGSDPFAASAGGADEDDLYS

SEQ ID NO: 17 - protein, 13 aa, Glycine max
DQSSSYDDDEYSK

SEQ ID NO: 18 - protein, 15 aa, Glycine max
KSDQSSSYDDDEYSK

SEQ ID NO: 19 - protein, 14 aa, Glycine max
SDQSSSYDDDEYSK

SEQ ID NO: 20 - protein, 9 aa, Glycine max
SYDDDEYSK

SEQ ID NO: 21 - protein, 18 aa, Glycine max
ALRALRLEDLRIPTAYIK

SEQ ID NO: 22 - protein, 18 aa, Glycine max
ALRLSGGDHVHAGTVVGK

SEQ ID NO: 23 - protein, 22 aa, Glycine max
LEGEREITLGFVDLLRDDFVEK

SEQ ID NO: 24 - protein, 14 aa, Glycine max
LRLEDLRIPTAYIK

SEQ ID NO: 25 - protein, 11 aa, Glycine max
LTYYTPDYETK

SEQ ID NO: 26 - protein, 11 aa, Glycine max
TDGLTSLDRYK

SEQ ID NO: 27 - protein, 14 aa, Glycine max
TFQGPPHGIQVERD

SEQ ID NO: 28 - protein, 15 aa, Glycine max
TFQGPPHGIQVERDK

SEQ ID NO: 29 - protein, 24 aa, Glycine max
APHTEDAIRVTQSTANFFISEARK

SEQ ID NO: 30 - protein, 23 aa, Glycine max
FVESGGARVIPLIYNESPENLNK

SEQ ID NO: 31 - protein, 7 aa, Glycine max
IWDLESK

SEQ ID NO: 32 - protein, 7 aa, Glycine max
SIVEDLK

SEQ ID NO: 33 - protein, 21 aa, Glycine max
QELDERARQGETVVPGGTGGK

SEQ ID NO: 34 - protein, 17 aa, Glycine max
SGEERAQEEAIDIDESK

SEQ ID NO: 35 - protein, 16 aa, Glycine max
AAAHVVEGAAGYAGHK

SEQ ID NO: 36 - protein, 11 aa, Glycine max
AKDYTLQAAEK

SEQ ID NO: 37 - protein, 17 aa, Glycine max
ARETHELGAHFESLADK

SEQ ID NO: 38 - protein, 15 aa, Glycine max
ATAVGWAAAHFSAEK

SEQ ID NO: 39 - protein, 17 aa, Glycine max
DTPQGSIEALQAGERVK

SEQ ID NO: 40 - protein, 9 aa, Glycine max
DYTLQAAEK

SEQ ID NO: 41 - protein, 10 aa, Glycine max
EEAQRELEAK

SEQ ID NO: 42 - protein, 21 aa, Glycine max
EGTGSIVFTAIGETVSSAGEK

SEQ ID NO: 43 - protein, 14 aa, Glycine max
ERGRESGGQVVAEK

SEQ ID NO: 44 - protein, 11 aa, Glycine max
GLAASAGETAK

SEQ ID NO: 45 - protein, 9 aa, Glycine max
GQQGYAVTK

SEQ ID NO: 46 - protein, 26 aa, Glycine max
KPSQPQEAEERPSEGIGETVRQYAQK

SEQ ID NO: 47 - protein, 8 aa, Glycine max
PAEIVQER

SEQ ID NO: 48 - protein, 15 aa, Glycine max
PQGSIEALQAGERVK

SEQ ID NO: 49 - protein, 17 aa, Glycine max
QAASETLNTTTQTAQEK

SEQ ID NO: 50 - protein, 13 aa, Glycine max
SAGGTTASYVGEK

SEQ ID NO: 51 - protein, 8 aa, Glycine max
SLTSIGEK

SEQ ID NO: 52 - protein, 16 aa, Glycine max
TPQGSIEALQAGERVK

SEQ ID NO: 53 - protein, 13 aa, Glycine max
VTDHAAANVVGNK

SEQ ID NO: 54 - protein, 22 aa, Glycine max
AASNAPAPLAGVIFEPFQELKK

SEQ ID NO: 55 - protein, 21 aa, Glycine max
ASNAPAPLAGVIFEPFQELKK

SEQ ID NO: 56 - protein, 18 aa, Glycine max
FFKESSEEEREHAEQLIK

SEQ ID NO: 57 - protein, 10 aa, Glycine max
GHGVWHFDQK

SEQ ID NO: 58 - protein, 13 aa, Glycine max
IAEYVAQLRLVGK

SEQ ID NO: 59 - protein, 14 aa, Glycine max
KIAEYVAQLRLVGK

SEQ ID NO: 60 - protein, 8 aa, Glycine max
LLHDEDHV

SEQ ID NO: 61 - protein, 20 aa, Glycine max
SNAPAPLAGVIFEPFQELKK

SEQ ID NO: 62 - protein, 10 aa, Glycine max
AGESESNLRK

SEQ ID NO: 63 - protein, 13 aa, Glycine max
GESEANVREIFDK

SEQ ID NO: 64 - protein, 12 aa, Glycine max
GILLYGPPGSGK

SEQ ID NO: 65 - protein, 11 aa, Glycine max
LAGESESNLRK

SEQ ID NO: 66 - protein, 12 aa, Glycine max
LSDDVDLERIAK

SEQ ID NO: 67 - protein, 16 aa, Glycine max
RELQETVQYPVEHPEK

SEQ ID NO: 68 - protein, 15 aa, Glycine max
TVFIIGATNRPDIID

SEQ ID NO: 69 - DNA, 2448 bp, Glycine max
atgaggaagtggacggttgcttccgctctccttcttctctctctcctctttctctttgcagatcaaggtcgaaagtttcaggcgaatgccgagggagattccgacgagcttgtagatccacccaaggtggaggacaagatcggtgctgtgcctcatggcctttcaaccgattcagatgtcgtcaagagggaggcggagtcgatctcgaagagatctctccggagcaacgcggagaagtttgagttccaagcggaagtgtcgcggcttatggatatcatcatcaattctctctacagtaacaaggatatcttcctcagagagttgatttccaatgcttctgatgctttggacaagattaggttcctctccctcacggataaggaggtgttgggagaaggtgataacaccaagcttgatattcagattaagttggacaaggaaaagaaaattctctcaattcgagacagaggtatcggtatgacgaaggaggatttgataaagaatttggggacaatagcgaaatctggaacttctgcatttgttgagaagatgcaaacaagtggagatctcaatctgattgggcagtttggagtcggcttctactctgtttatcttgtggccgactatgtcgaagttattagcaagaataacgatgataagcagtatgtatgggaatcaaaagctgatggagcattcgctatttcagaagatacatggaatgaaccacttggacgaggaactgagattagattacacctcaaggaagaggctggggaatacttggaggagtctaaactgaaagaattggtgaagagatactctgaatttattaacttccctatctatatttgggcaagcaaagaagttgatgtggaggttcccgctgatgaagatgattccagtgatgaagaggattcatctgaaagcagctccaaggaggaaagcgaagatgaagatgctgataaaagtgaagatgaagaaaaaaagcctaagacaaagacagtgaaggaaacaacttatgagtgggaacttttaaatgatgtgaaagctatatggctgaggaatccaaaagaggttacagaagaagaatacaccaaattctaccactctcttgccaaggatttcagtgatgagaaacctttagcatggagtcatttcactgctgagggtgatgttgagttcaaggcagtcctgtttgtaccacctaaggcacctcaagatttatatgagagctattataacgcaaacaaatcgaacctgaagttgtatgttagacgtgtgttcatttcagatgaatttaatgaactgttgcccaagtacctaaactttttgctgggtcttgttgattctgacactttgccacttaatgtatcacgagaaatgcttcaacaacatagtagtctgaagacaatcaagaagaaacttattaggaaagcccttgatatgatccgcaggattgctgatgaggatcctgacgagtcaactgacaaagaaaagaaagatgcatcctctgacaatgatgagaagaaaggtcaatattctaagttctggaatgagtttggtaaatccattaaacttggtatcatcgaggatgccaccaacagaaatcgtttggcaaaactgctcagatttgagagcaccaagtctgagggtaaattgacatctctggatcagtacatatctagaatgaaaactgggcagaaggatatcttttacataactggaaccagcaaagaacaactggaaaactctcccttccttgagcggcttaagaagaaaaattttgaggttattttcttcacggatccagttgatgagtacttgatgcaatacctgatggattatgaagacaagaagttccaaaatgtgtccaaggagggtttgaaacttgggaaagattcaaaagacaaggaactgaaggaatcttttaaggatcttaccaagtggtggaaaactgctctttccaaagacaatgttgatgatgtgaagatttccaaccgattagataacactccttgtgtagtggtgacatcaaaatttggttggagtgctaacatggagagaatcatgcagtctcaaactttgtcagatgctagcaagcaagcatacatgcgcggcaagagggttcttgagatcaatcctaggcaccctattatcaaggagctccgagagagagtagtaaagaaccctgaggatgagggtgtgaagcatacagcacagctgatgtaccagactgcactctttgaaagcggcttcctgcttgatgatcccaaggattttgcttcccggatttatgattcagtgaagactagcctggacatcagtcctgaagcaacagttgaggaggaagatgacactgaagtagaggctgaaagtgacgcgaaagaagattcaaagcctgaaactgatgctgttaacgatgataatgatgtcaaggacgagttgtag

SEQ ID NO: 70 - protein, 815 aa, Glycine max
MRKWTVASALLLLSLLFLFADQGRKFQANAEGDSDELVDPPKVEDKIGAVPHGLSTDSDVVKREAESISKRSLRSNAEKFEFQAEVSRLMDIIINSLYSNKDIFLRELISNASDALDKIRFLSLTDKEVLGEGDNTKLDIQIKLDKEKKILSIRDRGIGMTKEDLIKNLGTIAKSGTSAFVEKMQTSGDLNLIGQFGVGFYSVYLVADYVEVISKNNDDKQYVWESKADGAFAISEDTWNEPLGRGTEIRLHLKEEAGEYLEESKLKELVKRYSEFINFPIYIWASKEVDVEVPADEDDSSDEEDSSESSSKEESEDEDADKSEDEEKKPKTKTVKETTYEWELLNDVKAIWLRNPKEVTEEEYTKFYHSLAKDFSDEKPLAWSHFTAEGDVEFKAVLFVPPKAPQDLYESYYNANKSNLKLYVRRVFISDEFNELLPKYLNFLLGLVDSDTLPLNVSREMLQQHSSLKTIKKKLIRKALDMIRRIADEDPDESTDKEKKDASSDNDEKKGQYSKFWNEFGKSIKLGIIEDATNRNRLAKLLRFESTKSEGKLTSLDQYISRMKTGQKDIFYITGTSKEQLENSPFLERLKKKNFEVIFFTDPVDEYLMQYLMDYEDKKFQNVSKEGLKLGKDSKDKELKESFKDLTKWWKTALSKDNVDDVKISNRLDNTPCVVVTSKFGWSANMERIMQSQTLSDASKQAYMRGKRVLEINPRHPIIKELRERVVKNPEDEGVKHTAQLMYQTALFESGFLLDDPKDFASRIYDSVKTSLDISPEATVEEEDDTEVEAESDAKEDSKPETDAVNDDNDVKDEL

SEQ ID NO: 71 - protein, 14 aa, Glycine max
APQDLYESYYNANK

SEQ ID NO: 72 - protein, 8 aa, Glycine max
AVLFVPPK

SEQ ID NO: 73 - protein, 11 aa, Glycine max
DFASRIYDSVK

SEQ ID NO: 74 - protein, 17 aa, Glycine max
DIFLRELISNASDALDK

SEQ ID NO: 75 - protein, 10 aa, Glycine max
DIFYITGTSK

SEQ ID NO: 76 - protein, 7 aa, Glycine max
DNVDDVK

SEQ ID NO: 77 - protein, 17 aa, Glycine max
EDSKPETDAVNDDNDVK

SEQ ID NO: 78 - protein, 11 aa, Glycine max
EEAGEYLEESK

SEQ ID NO: 79 - protein, 13 aa, Glycine max
EQLENSPFLERLK

SEQ ID NO: 80 - protein, 10 aa, Glycine max
EVLGEGDNTK

SEQ ID NO: 81 - protein, 9 aa, Glycine max
EVTEEEYTK

SEQ ID NO: 82 - protein, 7 aa, Glycine max
FYHSLAK

SEQ ID NO: 83 - protein, 16 aa, Glycine max
IGAVPHGLSTDSDVVK

SEQ ID NO: 84 - protein, 15 aa, Glycine max
LGIIEDATNRNRLAK

SEQ ID NO: 85 - protein, 8 aa, Glycine max
NPEDEGVK

SEQ ID NO: 86 - protein, 9 aa, Glycine max
SGTSAFVEK

SEQ ID NO: 87 - protein, 26 aa, Glycine max
TSLDISPEATVEEEDDTEVEAESDAK

SEQ ID NO: 88 - DNA, 2442 bp, Glycine max
atgaggaagtggacggttgcttccgctctccttcttctctctctcctctttctctttgcagatcaaggtcgaaagtttcaggcgaatgccgagggagattccgacgagcttgtagatcctccgaaggtggaggacaagatcggtgctgtgcctcatggcctttccaccgattcagatgtcgtcaagagggagtcggagtcgatctcgaagagatctctccggagcaatgcggagaagtttgagttccaagcggaagtgtcacggcttatggatattatcatcaattctctctacagtaacaaggatatcttcctcagagagttgatttccaatgcttctgatgctttggacaagattaggttcctttccctcacggataaggacgttttgggagaaggtgataacaccaagcttgatattcagattaagttggacaaggaaaagaaaattctctcaattcgagacagaggtattggtatgacgaaggaggatttgataaagaatttggggacaatagcaaaatctggaacttctgcatttgttgagaagatgcaaacaagtggagatctcaatctgattgggcagtttggagtcggcttctactctgtttatctcgtggctgactatgtcgaagtcattagcaagaataatgatgataaacagtatgtatgggaatcaaaagctgatggagcatttgcaatttcagaagatacatggaatgaacctctagggcgtggaactgagattagattacacctcaaggaagaggctggggagtacttgcaggagtctaaactgaaagaattggtgaagagatactctgaatttattaacttccctatctatatttgggcaagcaaagaggttgatgtggaggttcccgctgatgaagatgattccagtgatgaagaggattcatctgaaagcagctccaaggaggaaagcgaagatgaagatgctgataaaagtgaagacgaagaaaaaaagcccaagacaaagacggtgaaggaaacaacttatgaatgggaacttttaaatgatgtgaaagctatatggctgaggaatccaaaggaggttacagaagaagaatacaccaaattctaccactctcttgccaaggatttcagtgatgagaaacctttagcatggagtcatttcactgctgagggcgatgtcgagttcaaggcagtcctgtttgtaccacctaaggcacctcaagatttatacgagagctattataacgcaaacaaatccaacctgaagttgtatgttagacgtgtgttcatttcagatgaatttaatgaactgttgcctaagtacctaaactttttgctgggtcttgttgattctgacacattgccacttaatgtatcgcgagaaatgcttcagcaacatagtagtctaaagacaatcaagaagaaacttattaggaaagcccttgatatgatccgtaggattgctgatgaggatcctgatgagtccactgacaaagaaaagaaagatacgtcatctgacaataatgagaagaaaggtcaatattccaagttctggaatgagtttggtaaatccattaaacttggtatcatcgaggatgccaccaacagaaatcgtttggcaaaactgctcagatttgagagcaccaagtctgagggtaaattgacatctctggatcagtacatatctagaatgaaagctgggcagaaggatatcttttacataactggaaccagcaaagaacaactggaaaactctccattccttgagcggcttaagaagaaaaattttgaggttattttcttcacggatccagttgatgaatacttgatgcaatacctgatggattatgaagacaagaagttccaaaatgtgtccaaggagggtttgaaactcgggaaagattcaaaagacaaggaactgaaggaatccttcaaggaccttaccaagtggtggaaaactgctctttccaaagacaatgttgatgatgtgaagatttccaaccgattggacaacactccttgtgtagtggtaacatcaaaatttggttggagtgctaacatggagagaatcatgcagtctcaaactttgtctgatgctagcaagcaagcatacatgcgcggcaagagggttcttgaggtcaatcctaggcaccctattatcaaggagctccgagagagagtagtaaagaaccctgaggatgagggtgtgaaacatacagcacagttgatgtaccagaccgcactcttcgaaagtggcttcctgcttgatgatcccaaggattttgcttcccgtatttatgattcagttaagaccagcttggacatcagtcctgaagcaacagttgaggaggaagatgacaccgaagtagaggctgaaagtgattcaaagcctgaagctgatgcggttcatgatggtgatgttgatgatgccaaggacgagttgtag

SEQ ID NO: 89 - protein, 813 aa, Glycine max
MRKWTVASALLLLSLLFLFADQGRKFQANAEGDSDELVDPPKVEDKIGAVPHGLSTDSDVVKRESESISKRSLRSNAEKFEFQAEVSRLMDIIINSLYSNKDIFLRELISNASDALDKIRFLSLTDKDVLGEGDNTKLDIQIKLDKEKKILSIRDRGIGMTKEDLIKNLGTIAKSGTSAFVEKMQTSGDLNLIGQFGVGFYSVYLVADYVEVISKNNDDKQYVWESKADGAFAISEDTWNEPLGRGTEIRLHLKEEAGEYLQESKLKELVKRYSEFINFPIYIWASKEVDVEVPADEDDSSDEEDSSESSSKEESEDEDADKSEDEEKKPKTKTVKETTYEWELLNDVKAIWLRNPKEVTEEEYTKFYHSLAKDFSDEKPLAWSHFTAEGDVEFKAVLFVPPKAPQDLYESYYNANKSNLKLYVRRVFISDEFNELLPKYLNFLLGLVDSDTLPLNVSREMLQQHSSLKTIKKKLIRKALDMIRRIADEDPDESTDKEKKDTSSDNNEKKGQYSKFWNEFGKSIKLGIIEDATNRNRLAKLLRFESTKSEGKLTSLDQYISRMKAGQKDIFYITGTSKEQLENSPFLERLKKKNFEVIFFTDPVDEYLMQYLMDYEDKKFQNVSKEGLKLGKDSKDKELKESFKDLTKWWKTALSKDNVDDVKISNRLDNTPCVVVTSKFGWSANMERIMQSQTLSDASKQAYMRGKRVLEVNPRHPIIKELRERVVKNPEDEGVKHTAQLMYQTALFESGFLLDDPKDFASRIYDSVKTSLDISPEATVEEEDDTEVEAESDSKPEADAVHDGDVDDAKDEL

SEQ ID NO: 90 - protein, 14 aa, Glycine max
APQDLYESYYNANK

SEQ ID NO: 91 - protein, 8 aa, Glycine max
AVLFVPPK

SEQ ID NO: 92 - protein, 11 aa, Glycine max
DFASRIYDSVK

SEQ ID NO: 93 - protein, 17 aa, Glycine max
DIFLRELISNASDALDK

SEQ ID NO: 94 - protein, 10 aa, Glycine max
DIFYITGTSK

SEQ ID NO: 95 - protein, 7 aa, Glycine max
DNVDDVK

SEQ ID NO: 96 - protein, 10 aa, Glycine max
DVLGEGDNTK

SEQ ID NO: 97 - protein, 11 aa, Glycine max
EEAGEYLQESK

SEQ ID NO: 98 - protein, 13 aa, Glycine max
EQLENSPFLERLK

SEQ ID NO: 99 - protein, 9 aa, Glycine max
EVTEEEYTK

SEQ ID NO: 100 - protein, 7 aa, Glycine max
FYHSLAK

SEQ ID NO: 101 - protein, 16 aa, Glycine max
IGAVPHGLSTDSDVVK

SEQ ID NO: 102 - protein, 15 aa, Glycine max
LGIIEDATNRNRLAK

SEQ ID NO: 103 - protein, 8 aa, Glycine max
NPEDEGVK

SEQ ID NO: 104 - protein, 9 aa, Glycine max
SGTSAFVEK

SEQ ID NO: 105 - DNA, 2103 bp, Glycine max
atggcttcggagactgagacgttcgcttttcaggccgagatcaaccagctcctcagtctaataatcaacaccttctacagcaacaaggagatctttcttcgtgagctcatcagcaatgcctctgacgctttggacaagattcgatttgagagtcttacagacaagagcaagcttgatgctcagccagagttgttcattcacattattcctgacaagaccaacaacacattgtctatcattgacagtggtattggcatgactaaggctgatttggtgaataacctcggtactattgcaaggtctgggaccaaggaattcatggaagccctggctgctggtgctgacgtgagcatgattgggcagttcggtgttggtttctactcggcttatcttgtagctgataaggttattgttaccacaaagcacaatgatgatgaacagtatgtctgggagtcccatgccggtggctcatttactgtgacaagagatacatctggtgagaaccttggtaggggaacaaagataactttgtttcttaaggaagatcaacttgagtatcttgaggaacgccgtctgaaggatttgataaagaagcattctgaattcattagctatccaatttctctctggattgagaagactactgaaaaggagatttctgatgatgaggatgaggaagagaagaaggatgaggagggtaaagttgaagatgtggatgaagataaggagaaggaggagaagaaaaagaagaccattaaggaggtatctcacgagtggtcattggtgaacaagcagaagcctatttggatgaggaaacctgaagagattacgaaagaagaatatgctgctttctacaagagtcttaccaatgattgggaagagcatttggctgttaagcacttttctgttgagggtcagctggagtttaaggctgtcctctttatccccaagagggcaccttttgatctctttgacaccaggaagaagcctaacaacatcaaactgtatgtccgccgtgtcttcatcatggacaactgtgaggagttgatgcctgaatatcttagctttgttaagggtattgtggattctgaggatcttcctctcaacatttctagagaaatgctgcagcagaacaagatcctgaaagtcatcaggaagaacttggtcaagaagtgcattgagatgttctttgaaattgctgaaaacaaggaagactataacaagttttatgaagccttctctaagaacctgaaacttggtattcatgaggattctcagaacaagacaaagctagctgaattgctcaggtatcactccactaagagtggtgatgagatgaccagcctcaaggactatgttaccaggatgaaggaaggacagaatgacatctactacattactggtgaaagcaagaaagctgtcgagaattcccccttccttgaaaagcttaagaagaagggatacgaggttctctacatggttgatgctattgatgagtatgctgttggccagcttaaggaatttgagggaaagaagttggtctctgctaccaaggaaggcctaaaacttgatgagagcgaagacgagaagaaaaagaaggaagaactaaaggataaatttgagggtctttgccatgtgatcaaggatgtgttgggtgacaaggtggagaaagttgtggtgtctgatcgtgttgtggattctccttgctgtctggtgacaggtgaatatgggtggacagccaacatggaaaggattatgaaagcacaggcattgagggacagcagcatggctggatacatgtcaagcaagaagacgatggagattaaccctgagaaccccatcatggaggagctgaggaagcgagcagatgctgataagaatgacaagtctgtgaaggatctcgtgctcttgctctttgagactgctcttctaacttctgggttcagccttgatgatcccaacactttcggtaacaggattcacaggatgctgaagcttggactgagcattgatgaagatgctggtgaagcagatgctgacatgcctcctcttgaggacgctgatgcagatgctgagggtagcaagatggaagaagttgattaa

SEQ ID NO: 106 - protein, 700 aa, Glycine max
MASETETFAFQAEINQLLSLIINTFYSNKEIFLRELISNASDALDKIRFESLTDKSKLDAQPELFIHIIPDKTNNTLSIIDSGIGMTKADLVNNLGTIARSGTKEFMEALAAGADVSMIGQFGVGFYSAYLVADKVIVTTKHNDDEQYVWESHAGGSFTVTRDTSGENLGRGTKITLFLKEDQLEYLEERRLKDLIKKHSEFISYPISLWIEKTTEKEISDDEDEEEKKDEEGKVEDVDEDKEKEEKKKKTIKEVSHEWSLVNKQKPIWMRKPEEITKEEYAAFYKSLTNDWEEHLAVKHFSVEGQLEFKAVLFIPKRAPFDLFDTRKKPNNIKLYVRRVFIMDNCEELMPEYLSFVKGIVDSEDLPLNISREMLQQNKILKVIRKNLVKKCIEMFFEIAENKEDYNKFYEAFSKNLKLGIHEDSQNKTKLAELLRYHSTKSGDEMTSLKDYVTRMKEGQNDIYYITGESKKAVENSPFLEKLKKKGYEVLYMVDAIDEYAVGQLKEFEGKKLVSATKEGLKLDESEDEKKKKEELKDKFEGLCHVIKDVLGDKVEKVVVSDRVVDSPCCLVTGEYGWTANMERIMKAQALRDSSMAGYMSSKKTMEINPENPIMEELRKRADADKNDKSVKDLVLLLFETALLTSGFSLDDPNTFGNRIHRMLKLGLSIDEDAGEADADMPPLEDADADAEGSKMEEVD

SEQ ID NO: 107 - protein, 16 aa, Glycine max
ADLVNNLGTIARSGTK

SEQ ID NO: 108 - protein, 10 aa, Glycine max
AVENSPFLEK

SEQ ID NO: 109 - protein, 13 aa, Glycine max
EDQLEYLEERRLK

SEQ ID NO: 110 - protein, 8 aa, Glycine max
EEYAAFYK

SEQ ID NO: 111 - protein, 14 aa, Glycine max
EGQNDIYYITGESK

SEQ ID NO: 112 - protein, 17 aa, Glycine max
EIFLRELISNASDALDK

SEQ ID NO: 113 - protein, 7 aa, Glycine max
FYEAFSK

SEQ ID NO: 114 - protein, 11 aa, Glycine max
HFSVEGQLEFK

SEQ ID NO: 115 - protein, 9 aa, Glycine max
IRFESLTDK

SEQ ID NO: 116 - protein, 11 aa, Glycine max
LAELLRYHSTK

SEQ ID NO: 117 - protein, 8 aa, Glycine max
LDESEDEK

SEQ ID NO: 118 - protein, 10 aa, Glycine max
LGIHEDSQNK

SEQ ID NO: 119 - protein, 11 aa, Glycine max
RAPFDLFDTRK

SEQ ID NO: 120 - protein, 8 aa, Glycine max
VEDVDEDK

SEQ ID NO: 121 - DNA, 2109 bp, Glycine max
atggcggagacagagacgttcgcattccaagcagagatcaaccagctcctcagtctcatcatcaacaccttctactccaacaaggagattttccttcgtgaactcatcagcaacgcctccgatgctttggacaagattcgatttgagagtttgacagataagagcaagctcgatgctcagccagagttgttcattcatattattccagacaagactaacaatacactgaccattgttgacagtggtattggcatgaccaaagctgatttggtgaacaacttgggtacaattgctagatctggtaccaaggaattcatggaagccttggctgctggtgctgatgttagtatgattggacagtttggtgtggggttctactctgcatatcttgttgctgagaaggtcattgttacaaccaaacacaatgatgatgaacagtatgtttgggagtctcaagctggaggttctttcactgtcaccagggataacactggtgaggttcttggcaggggtactaagatcactctctacctcaaggaagatcagcttgagtaccttgaggagcgtcgcttgaaggatctgatcaagaagcattctgagttcattagctacccaatttctctttggattgagaagactactgagaaggagatctctgacgatgaggatgaggaagagaagaaggatgaggagggtaaggtggaggatgttgacgaagagaaggagaaggaagaaaaaaagaaaaagaagatcaaggaagtgtcacatgaatggtccttggtgaacaagcagaagcccatttggatgaggaagcctgaggagatcacaaaagaggagtattctgctttctacaagagtcttaccaatgactgggaagagcatttggctgtcaagcacttctctgttgagggtcagttggagtttaaggctatactctttgttcccaagagggcaccttttgacctctttgacacaaggaagaagcctaacaacattaagctctatgtccgccgtgtctttattatggacaactgtgaggagttgattcctgagtatttgggctttgtcaagggtattgttgattctgaagatctcccactcaacatttcaagagaaatgttgcaacagaacaagatcttgaaggtcatccgtaagaacttggtcaagaagtgccttgagctcttctttgaaattgcagagaacaaggaggattacaacaagttctatgaggctttctctaagaacttaaagcttggtatccatgaggattcccagaacaagggaaagattgctgaattgctcaggtaccactccaccaagagtggtgatgagctgacaagcctcaaggattatgtgaccaggatgaaggaaggtcagagtgacatctactacatcaccggtgaaagcaagaaggctgttgagaactccccattcttggagaagttgaagaagaaagggtatgaggttcttttcatggttgatgccattgatgaatatgctgttggccagctcaaggaatttgagggcaagaagcttgtctctgccaccaaggagggtctcaaacttgacgagagtgaagatgagaagaagaagcaagaggagttgaaggagaagtttgacaacctatgcaaggtgatcaaggatgttttgggtgacaaggttgagaaggttgtagtctctgaccgtgttgttgattcaccatgctgtctggtgactggagaatacggttggactgcaaacatggaaaggatcatgaaagctcaagccctaagggacaacagcatggcaggatacatgtcaagcaagaagacaatggagatcaaccctgagaacccaatcatggaggagctcaggaagcgtgcggatgctgacaagaacgacaaatccgtgaaggaccttgttctgttgctgttcgagactgctcttctcacttctggtttcagccttgacgaacccaacacttttggaaacaggatccacagaatgttgaagcttggactgagcatcgacgaggatgcagctgaagctgatgctgatgctgatatgcccccactggaggaggaggctgaagctgatgctgagggcagcaaaatggaggaggttgattaa

SEQ ID NO: 122 - protein, 702 aa, Glycine max
MAETETFAFQAEINQLLSLIINTFYSNKEIFLRELISNASDALDKIRFESLTDKSKLDAQPELFIHIIPDKTNNTLTIVDSGIGMTKADLVNNLGTIARSGTKEFMEALAAGADVSMIGQFGVGFYSAYLVAEKVIVTTKHNDDEQYVWESQAGGSFTVTRDNTGEVLGRGTKITLYLKEDQLEYLEERRLKDLIKKHSEFISYPISLWIEKTTEKEISDDEDEEEKKDEEGKVEDVDEEKEKEEKKKKKIKEVSHEWSLVNKQKPIWMRKPEEITKEEYSAFYKSLTNDWEEHLAVKHFSVEGQLEFKAILFVPKRAPFDLFDTRKKPNNIKLYVRRVFIMDNCEELIPEYLGFVKGIVDSEDLPLNISREMLQQNKILKVIRKNLVKKCLELFFEIAENKEDYNKFYEAFSKNLKLGIHEDSQNKGKIAELLRYHSTKSGDELTSLKDYVTRMKEGQSDIYYITGESKKAVENSPFLEKLKKKGYEVLFMVDAIDEYAVGQLKEFEGKKLVSATKEGLKLDESEDEKKKQEELKEKFDNLCKVIKDVLGDKVEKVVVSDRVVDSPCCLVTGEYGWTANMERIMKAQALRDNSMAGYMSSKKTMEINPENPIMEELRKRADADKNDKSVKDLVLLLFETALLTSGFSLDEPNTFGNRIHRMLKLGLSIDEDAAEADADADMPPLEEEAEADAEGSKMEEVD

SEQ ID NO: 123 - protein, 16 aa, Glycine max
ADLVNNLGTIARSGTK

SEQ ID NO: 124 - protein, 10 aa, Glycine max
AVENSPFLEK

SEQ ID NO: 125 - protein, 13 aa, Glycine max
EDQLEYLEERRLK

SEQ ID NO: 126 - protein, 8 aa, Glycine max
EEYSAFYK

SEQ ID NO: 127 - protein, 14 aa, Glycine max
EGQSDIYYITGESK

SEQ ID NO: 128 - protein, 17 aa, Glycine max
EIFLRELISNASDALDK

SEQ ID NO: 129 - protein, 7 aa, Glycine max
FYEAFSK

SEQ ID NO: 130 - protein, 11 aa, Glycine max
HFSVEGQLEFK

SEQ ID NO: 131 - protein, 11 aa, Glycine max
IAELLRYHSTK

SEQ ID NO: 132 - protein, 9 aa, Glycine max
IRFESLTDK

SEQ ID NO: 133 - protein, 8 aa, Glycine max
LDESEDEK

SEQ ID NO: 134 - protein, 10 aa, Glycine max
LGIHEDSQNK

SEQ ID NO: 135 - protein, 11 aa, Glycine max
RAPFDLFDTRK

SEQ ID NO: 136 - protein, 9 aa, Glycine max
SGDELTSLK

SEQ ID NO: 137 - protein, 8 aa, Glycine max
VEDVDEEK

SEQ ID NO: 138 - DNA, 2109 bp, Glycine max
atggcttcggagactgagacgtttgcttttcaggccgagatcaaccagctcctcagtctaatcatcaacaccttctacagcaacaaggagatctttcttcgtgagctcatcagcaatgcctctgatgctttggacaagattcgatttgagagtcttacagacaagagcaagcttgatgctcagccagagttgttcattcacattattcctgacaagaccaacaacacattgtctatcattgacagtggtattggcatgactaaggccgatttggtgaataacctcggtactattgcaaggtctgggaccaaggaattcatggaagccctggctgctggtgctgatgtgagcatgattggacagtttggtgttggtttctactcggcttatcttgtagctgacaaggttattgttaccacaaagcacaatgatgatgagcagtatgtctgggagtcccatgctggtggctcatttactgtgacaagggatacatctggtgagaaccttggtaggggaacaaagataactttgtttctcaaggaagatcaacttgagtatcttgaggaacgccgtctgaaggatttgataaagaagcattctgaattcattagctatccaatttctctttggattgagaagaccactgaaaaggagatttctgatgatgaggacgaggaagagaagaaggatgaggagggtaaagttgaagatgtggatgaagataaggagaaggaggagaagaaaaagaagaccattaaggaggtatctcatgagtggtcattggtgaacaagcagaagcctatttggatgaggaaacctgaagagatcacaaaagaagaatatgctgctttctacaagagtcttaccaatgattgggaagagcatttggctgttaagcacttttctgttgagggtcagctggagtttaaggctgtcctctttatccccaagagggcaccttttgatctttttgacactaagaagaagcctaacaacatcaaactgtatgtccgccgtgttttcatcatggacaactgtgaggagttgatgccagaatatcttagctttgttaagggtattgtggattctgaggatcttcctctcaacatttctagagaaatgctgcagcagaacaagatcctgaaagtcatcaggaagaacttggtcaagaagtgcattgagatgttctttgaaattgctgagaacaaggaagactataacaagttttatgaagccttctctaagaatctgaaacttggtattcatgaggattctcagaacaagacaaaacttgctgaattgctcaggtatcactccaccaagagtggtgatgagatgaccagcctcaaggactatgttaccaggatgaaggaagggcagaatgacatctactacattactggtgaaagcaagaaagctgttgagaattcccctttccttgaaaagcttaagaagaaggggttcgaggttctctacatggttgatgctattgacgagtatgctgttggtcagcttaaggaatttgagggaaagaagttggtctctgctactaaggaaggcctgaaacttgacgagagcgaagacgaaaagaaaaagaaggaagaattgaaggagaaatttgagggtctctgccatgtgatcaaggatgtgttgggtgacaaggtggagaaagttgtggtgtctgatcgtgttgtggattctccttgctgtctcgtgactggtgaatatgggtggacagccaacatggaaaggattatgaaagcacaggcattgagggacagcagcatggctggatacatgtcgagcaagaagaccatggagattaaccctgagaaccccatcatggatgaactgaggaagcgagctgatgctgacaagaatgacaaatctgtgaaggatctcgttctcctactctttgagactgctcttctaacttctgggttcagccttgatgatcccaacactttcggtaacaggattcacaggatgctgaagcttggactgagcattgatgaagatgctggtgaagcagatgctgacatgcctcctctcgaggacgccgatgctgatgccgatgctgagggtagcaagatggaagaagttgattaa

SEQ ID NO: 139 - protein, 702 aa, Glycine max
MASETETFAFQAEINQLLSLIINTFYSNKEIFLRELISNASDALDKIRFESLTDKSKLDAQPELFIHIIPDKTNNTLSIIDSGIGMTKADLVNNLGTIARSGTKEFMEALAAGADVSMIGQFGVGFYSAYLVADKVIVTTKHNDDEQYVWESHAGGSFTVTRDTSGENLGRGTKITLFLKEDQLEYLEERRLKDLIKKHSEFISYPISLWIEKTTEKEISDDEDEEEKKDEEGKVEDVDEDKEKEEKKKKTIKEVSHEWSLVNKQKPIWMRKPEEITKEEYAAFYKSLTNDWEEHLAVKHFSVEGQLEFKAVLFIPKRAPFDLFDTKKKPNNIKLYVRRVFIMDNCEELMPEYLSFVKGIVDSEDLPLNISREMLQQNKILKVIRKNLVKKCIEMFFEIAENKEDYNKFYEAFSKNLKLGIHEDSQNKTKLAELLRYHSTKSGDEMTSLKDYVTRMKEGQNDIYYITGESKKAVENSPFLEKLKKKGFEVLYMVDAIDEYAVGQLKEFEGKKLVSATKEGLKLDESEDEKKKKEELKEKFEGLCHVIKDVLGDKVEKVVVSDRVVDSPCCLVTGEYGWTANMERIMKAQALRDSSMAGYMSSKKTMEINPENPIMDELRKRADADKNDKSVKDLVLLLFETALLTSGFSLDDPNTFGNRIHRMLKLGLSIDEDAGEADADMPPLEDADADADAEGSKMEEVD

SEQ ID NO: 140 - protein, 16 aa, Glycine max
ADLVNNLGTIARSGTK

SEQ ID NO: 141 - protein, 10 aa, Glycine max
AVENSPFLEK

SEQ ID NO: 142 - protein, 13 aa, Glycine max
EDQLEYLEERRLK

SEQ ID NO: 143 - protein, 8 aa, Glycine max
EEYAAFYK

SEQ ID NO: 144 - protein, 14 aa, Glycine max
EGQNDIYYITGESK

SEQ ID NO: 145 - protein, 17 aa, Glycine max
EIFLRELISNASDALDK

SEQ ID NO: 146 - protein, 7 aa, Glycine max
FYEAFSK

SEQ ID NO: 147 - protein, 11 aa, Glycine max
HFSVEGQLEFK

SEQ ID NO: 148 - protein, 9 aa, Glycine max
IRFESLTDK

SEQ ID NO: 149 - protein, 11 aa, Glycine max
LAELLRYHSTK

SEQ ID NO: 150 - protein, 8 aa, Glycine max
LDESEDEK

SEQ ID NO: 151 - protein, 10 aa, Glycine max
LGIHEDSQNK

SEQ ID NO: 152 - protein, 10 aa, Glycine max
RAPFDLFDTK

SEQ ID NO: 153 - protein, 8 aa, Glycine max
VEDVDEDK

SEQ ID NO: 154 - DNA, 2109 bp, Glycine max; identical to SEQ ID NO: 138

SEQ ID NO: 155 - protein, 839 aa, Glycine max
MKLSPREVEKLGLHNAGYLAQKRLARGLRLNYTEAVALIATQIMEFARDGEKTVAQLMCIGKHLLGRRQVLPEVQHLLNAVQVEATFPDGTKLVTVHDPISCEHGDLGQALFGSFLPVPSLDKFAENKEDNRIPGEIIYGDGSLVLNPGKNAVILKVVSNGDRPIQVGSHYHFIEVNPYLTFDRRKAYGMRLNIAAGTAVRFEPGDSKSVKLVRIGGNKVIRGGNGIADGQVNETNLREAMEAVCKRGFGHKEEEDASEGITGDPDSPFTTIIPREEYANKYGPTTGDKIRLGDTDLFAKIEKDFALYGDECVFGGGKVLRDGMGQSCGDPPAISLDTVITNAVIIDYSGIIKADIGIKDGLIVSIGKAGNPDIMDDVFFNMIIGANTEVIAGEGLIVTAGAIDCHVHYICPQLVDEAISSGITTLVGGGTGPTAGTRATTCTPAPSQMKLMLQSTDDLPLNFGFTGKGSSSKPDELHDIIKAGAMGLKLHEDWGSTPAAIDSCLTVADQYDIQINIHTDTLNEAGFVEHSIAAFKGRTIHTYHSEGAGGGHAPDIIKVCGMKNVLPSSTNPTRPLTLNTIDEHLDMLMVCHHLNREIPEDLAFACSRIREGTIAAEDILHDIGAISIISSDSQAMGRVGEVISRTWQTANKMKVQRGPLQPGESDNDNFRIKRYIAKYTINPAIANGFSQYVGSVEVGKLADLVMWKPSFFGAKPEMVIKGGVVAWADMGDPNASIPTPEPVKMRPMFGTLGKAGGALSIAFVSKAAVDQRVHALYGLNKRVEAVGNVRKLTKLDMKLNDSLPQITVDPDNYTVTADGEVLTSFATTFVPLSRNYFLF

SEQ ID NO: 156 - protein, 12 aa, Glycine max
AGGALSIAFVSK

SEQ ID NO: 157 - protein, 9 aa, Glycine max
DGLIVSIGK

SEQ ID NO: 158 - DNA, 2946 bp, Glycine max
atggcttcttcttccacgacaatgcggttctccgcggcctccaccggcgccgcggcggcgcttcctcgccggagctccgtcgccggattcatcggcgtcgcggccagatcctccgccaaatcgaggctccgcttcatcggaaggaacgcgaacttgagcctccggatgaggaggatgagctctttctccgtcgtgaagtgcgtctccggaagcgaggccaaggtgcaggataccgtggccaaacaacaagaagctacaacctctctcagctccttcacgccagatgcttcatctattgcctcaagtattaaataccatgcagagttcactccattgttttctccagagaattttgatctaccacaggcttttcttgcaactgcacaaagtgttcgagattctctcattataaactggaatgctacctatgattactatgagaaactgaatgttaagcaggcatattacctttcgatggaatttttgcagggtagagcattattaaatgcaataggcaatctggagctaactggtccctatgctgaggctttgagcaagctcgggcataaattagaaaatgtggcataccaggagccagatgctgcacttggaaatggtggtcttgggcgtcttgcttcatgtttcttggactctttggcaaccttgaactatccagcttggggttatggattgagatataagtatggtttatttaaacagcgaataaccaaagatgggcaggaggaagttgctgaagattggcttgagatgggcaatccctgggagattattagaaatgatgtttcatatcctgtaaagttctatggcaaggttgtttcagggtcagatggtaaaaaacattggattggaggagaagatataaaagctgttgcacatgatgttcccataccaggatataaaactaagactacaatcaacttgagactttggtctacaaaagctgcatcagaagaatttgatttatctgcttttaatgctggaaggcacactgaagcatctgaggctctagcaaatgctgaaaagatatgctatatactctaccctggggatgaaccaatagagggcaagatccttcgcctcaagcaacaatatactttatgttctgcttctcttcaagacatcattgctcgttttgagagaagatcaggagcaaatgttaattgggaagagtttcccgagaaggttgcagtgcagatgaatgatactcacccaacgttgtgcatcccagagctcatgagaattttaatagatgtaaagggcttaaattggaaggatgcttggaatattacacaaaggactgtagcatatacaaaccacactgttcttccagaggcattagagaaatggagcttggatcttatgcagaaactgcttccacgccatattgagataatagaaatgattgacgaggagctggttcggaccataattgcagaatatggcacagaaaattcagacttgctggagaaaaaattgaaggaaatgagaatactagaaaatgtcgaattgactgcagaatttgcagatatactggttaagtccaaagaggccattgatattcctagtgaggagctgcaaagttctgaacaagcagaagcagaagacgaaaaagatgatgatgaagtggaagcagttgctaaaaagaatggaacagatgaaagttccattgaggatgagaaagaagagttgcctgagccagtaccagaaccaccaaaattggttcgtatggcaaatttgtgtgttgtgggtggtcatgcagtgaatggggttgcagagatacatagtgaaattgtaaaagatgatgttttcaatgcattttataagttgtggcccgagaagttccaaaacaaaacaaatggtgtgacaccaaggagatggatcaggttctgcaatccagatctgagtaaaataataaccgagtggataggtactgaggattgggtcctaaatactggaaaattggccgagctacggaagtttgtagacaatgaggatctacaagtgcagtggagggaagcaaagaggagtaacaaagttaaagttgcagcattcatcagagaaaaaacagggtattctgtcagtcctgatgcaatgtttgacatccaggtgaagagaatccatgaatataagcgacaattaatgaacatatttggaattgtttaccgatacaagaagatgaaagaaatgagtgcggcagaaagggaagcaaattttgttcctagagtttgtatatttgggggaaaagcatttgctacatatgtgcaagccaagagaattgtgaaatttattacagatgttggggctacagtaaatcatgaccctgaaataggagatctacttaaggttgtttttgtccctgattataatgtcagtgttgccgagatgcttattccagcaagtgaattgtcacaacatatcagtactgctggaatggaggcaagtggaactagcaatatgaaatttgcaatgaatggctgcatattgattggaactttagatggggccaatgttgaaataagggaagaggttggtgcagacaacttcttcctctttggtgccaaggctcatgaaattgctgggctgaggaaagaaagagcagagggaaagtttgtgcctgatccacgatttgaagaagttaaagaatttgtcagaagtggcatttttggatcttacaactatgacgaattgatgggatccttagaaggaaatgaaggttttggtcgagcagattatttccttgtagggaaagactttcccagctacatagaatgccaagagaaggttgatgaagcataccgtgaccaaactaaatggacaagaatgtcaatattgaacacagcaggttcatacaagtttagcagtgaccgcacgattcatgaatatgcccgagagatatggaacattgaaccagtccaattgccatag

SEQ ID NO: 159 - protein, 981 aa, Glycine max
MASSSTTMRFSAASTGAAAALPRRSSVAGFIGVAARSSAKSRLRFIGRNANLSLRMRRMSSFSVVKCVSGSEAKVQDTVAKQQEATTSLSSFTPDASSIASSIKYHAEFTPLFSPENFDLPQAFLATAQSVRDSLIINWNATYDYYEKLNVKQAYYLSMEFLQGRALLNAIGNLELTGPYAEALSKLGHKLENVAYQEPDAALGNGGLGRLASCFLDSLATLNYPAWGYGLRYKYGLFKQRITKDGQEEVAEDWLEMGNPWEIIRNDVSYPVKFYGKVVSGSDGKKHWIGGEDIKAVAHDVPIPGYKTKTTINLRLWSTKAASEEFDLSAFNAGRHTEASEALANAEKICYILYPGDEPIEGKILRLKQQYTLCSASLQDIIARFERRSGANVNWEEFPEKVAVQMNDTHPTLCIPELMRILIDVKGLNWKDAWNITQRTVAYTNHTVLPEALEKWSLDLMQKLLPRHIEIIEMIDEELVRTIIAEYGTENSDLLEKKLKEMRILENVELTAEFADILVKSKEAIDIPSEELQSSEQAEAEDEKDDDEVEAVAKKNGTDESSIEDEKEELPEPVPEPPKLVRMANLCVVGGHAVNGVAEIHSEIVKDDVFNAFYKLWPEKFQNKTNGVTPRRWIRFCNPDLSKIITEWIGTEDWVLNTGKLAELRKFVDNEDLQVQWREAKRSNKVKVAAFIREKTGYSVSPDAMFDIQVKRIHEYKRQLMNIFGIVYRYKKMKEMSAAEREANFVPRVCIFGGKAFATYVQAKRIVKFITDVGATVNHDPEIGDLLKVVFVPDYNVSVAEMLIPASELSQHISTAGMEASGTSNMKFAMNGCILIGTLDGANVEIREEVGADNFFLFGAKAHEIAGLRKERAEGKFVPDPRFEEVKEFVRSGIFGSYNYDELMGSLEGNEGFGRADYFLVGKDFPSYIECQEKVDEAYRDQTKWTRMSILNTAGSYKFSSDRTIHEYAREIWNIEPVQLP

SEQ ID NO: 160 - protein, 9 aa, Glycine max
AFATYVQAK

SEQ ID NO: 161 - protein, 23 aa, Glycine max
QQEATTSLSSFTPDASSIASSIK

SEQ ID NO: 162 - DNA, 2706 bp, Glycine max
atggcgactgagaatcctttcaatagcattttgacgacgctcgaaaagcccggtggtgctggcgagtttggaaagtactttagcttgcctgctctcaacgatcgtagaatcgatagacttccttactctgtgaggatacttttggaatctgcaatccggaactgtgatgagtttcaagttaagagtaacgacgttgaaaaaattattgattgggagaatacctctccgaagctggtggagattccattcaagccagctagagtgcttctccaggattttactggcgtgcctgctgttgtcgatcttgcttgcatgcgagatgccatgaacaaacttggtggtgattctaataaaattaatcccttggtaccagttgatcttgtcattgatcactctgttcaagttgatgtggcaagatcagaaaatgctgtccaggcaaatatggaacttgaattccaaagaaacaaggaaagatttggtttcctcaaatggggttctaatgcattcaataatatgcttgtcgttcctcctggatcagggatagttcaccaggttaatttagaataccttggtagagttgtgttcaacacaaatggtgtgctttatcctgacagcgttgttggaactgattcacacacaactatgattgatggcctgggtgttgctggatggggagttggtggaatagaagcagaagctgcaatgcttggccaacccatgagcatggtcctaccgggtgtcgttgggttcaaattattaggcaaactacgagatggtgtcacagctactgacttggtgttgactgttacacaaatgctaagaaagcatggggttgttggcaagtttgtagagttttatggggaaggcatgagtgaactgtctttggcagatcgtgccaccatagcaaacatgtctcctgagtatggtgcaaccatgggcttctttcctgtggatcatgtcactttgcaatatttgagactgactggcagaagtgatgagactgtttctatgatagaatcgtacttacgagcaaataagatgtttgtggattacagcgagccccaagtggagagagtgtactcatcgtatttggaactcaatcttgaggatgtagaaccctgtgtctcaggtccaaaaaggcctcatgaccgtgtccctttgagagaaatgaaggtagactggcatgcctgcctcaacaataaagttggattcaagggttttgctgtaccaaaagaatctcagaataaggttgcagagttcacattccaagggacaccagcacatcttaggcacggtgatgttgttatagctgctatcaccagttgtacaaatacttcaaatcctagcgtaatgcttggagctgcattggttgcaaagaaagcatgtgaattgggattgcaggtgaagccatggattaaaacaagccttgccccaggttctggtgttgtgactaagtatttgcagaggagtggcttgcagaagtatttgaatgagctagggtttaatatagttgggtatggatgcaccacatgcattggaaattcaggggatattaatgaagctgttgcatctgcaattactgaaaatgatatagtagctgcagctgtactgtctggaaataggaactttgagggccgagttcacccattaacaagagctaattatcttgcttctcctcctcttgttgttgcctatgcccttgctggcacagtggacattgactttgacactgaacccattgggatagggaaggatggcacaaagatcttcttcagggatatttggccatccagtgaagaaatagcaaatgttgtacaatcaagtgtgctgcctgctatgtttagggacacatataatgcgatcacccaagggaatcccatgtggaataatttatctgttccaactggcactctttatgcttgggaccctacatcaacttatattcatgagccaccttattttagagatatgagcatgtctcccccaggctctcatggagtgaaagatgcttactgtttgctcaactttggagacagtatcacaactgaccacatctctccagctggcagcatacataaggacagtcctgcagccagataccttatagaacgtggggttgatagacgggacttcaactcctatggaagtcgccgtggtaatgatgaggtgatggcccgaggaacttttgccaatattcgcattgtcaacaaatttttgaatggagaagttggacctaaaactattcatattccttctggggagaagttatcagtctttgatgctgcagagaaatacaagagtgaggggcatgatatgattatcttggctggtgctgagtatgggagtggaagctctcgtgattgggctgcaaaggggccaatgctactgggcgtgaaagctgtcatagcaaaaagttttgaaaggattcaccgaagtaatttggtgggaatgggtatcattccattgtgttttaagcccggggatgatgctgattctcttggattaactggccatgaacgttacaccattgatctaccaagcaatgtgaatgaaatacgacccggccaagatgtcacagtggtgacagatgccgggaaatcatttgtatctacactgagatttgatacagaggttgaactagcttacttcaaccatggaggcatcttacaatatgtcatcagaaacatggtcaatgctaaacattga

SEQ ID NO: 163 - protein, 901 aa, Glycine max
MATENPFNSILTTLEKPGGAGEFGKYFSLPALNDRRIDRLPYSVRILLESAIRNCDEFQVKSNDVEKIIDWENTSPKLVEIPFKPARVLLQDFTGVPAVVDLACMRDAMNKLGGDSNKINPLVPVDLVIDHSVQVDVARSENAVQANMELEFQRNKERFGFLKWGSNAFNNMLVVPPGSGIVHQVNLEYLGRVVFNTNGVLYPDSVVGTDSHTTMIDGLGVAGWGVGGIEAEAAMLGQPMSMVLPGVVGFKLLGKLRDGVTATDLVLTVTQMLRKHGVVGKFVEFYGEGMSELSLADRATIANMSPEYGATMGFFPVDHVTLQYLRLTGRSDETVSMIESYLRANKMFVDYSEPQVERVYSSYLELNLEDVEPCVSGPKRPHDRVPLREMKVDWHACLNNKVGFKGFAVPKESQNKVAEFTFQGTPAHLRHGDVVIAAITSCTNTSNPSVMLGAALVAKKACELGLQVKPWIKTSLAPGSGVVTKYLQRSGLQKYLNELGFNIVGYGCTTCIGNSGDINEAVASAITENDIVAAAVLSGNRNFEGRVHPLTRANYLASPPLVVAYALAGTVDIDFDTEPIGIGKDGTKIFFRDIWPSSEEIANVVQSSVLPAMFRDTYNAITQGNPMWNNLSVPTGTLYAWDPTSTYIHEPPYFRDMSMSPPGSHGVKDAYCLLNFGDSITTDHISPAGSIHKDSPAARYLIERGVDRRDFNSYGSRRGNDEVMARGTFANIRIVNKFLNGEVGPKTIHIPSGEKLSVFDAAEKYKSEGHDMIILAGAEYGSGSSRDWAAKGPMLLGVKAVIAKSFERIHRSNLVGMGIIPLCFKPGDDADSLGLTGHERYTIDLPSNVNEIRPGQDVTVVTDAGKSFVSTLRFDTEVELAYFNHGGILQYVIRNMVNAKH

SEQ ID NO: 164 - protein, 9 aa, Glycine max
FLNGEVGPK

SEQ ID NO: 165 - protein, 9 aa, Glycine max
LSVFDAAEK

SEQ ID NO: 166 - protein, 9 aa, Glycine max
LSVFDVAEK

SEQ ID NO: 167 - protein, 12 aa, Glycine max
TSLAPGSGVVTK

SEQ ID NO: 168 - DNA, 2706 bp, Glycine max
atggcgactgagaaccctttcaatagcattttgaggacgctcgagaagcccggcggcgctggcgagtttggaaagtactttagcttgcccgctctcaacgatcctagaatcgatagacttccttactctgtgaggatacttttggaatctgcaatccgtaactgtgatgagtttcaagttaagagtaacgacattgaaaaaattattgattgggagaatacctctcccaagctggtggagattccattcaagccagctagagtgcttctgcaggactttactggggtgcctgctgtggttgatcttgcttgcatgcgagatgcaatgaacaaacttggtggtgattctaataaaattaaccccttggtaccagttgatcttgtcattgatcactctgttcaagttgatgtggcaagatcagaaaatgctgtccaggcaaatatggaacttgaattccaaagaaacaaggaaagatttggtttcctcaaatggggttctaatgcattcaataatatgcttgtcgttcctcctggatcagggatagttcatcaggttaatttagaataccttggtagagttgtgttcaacacaaatggtgtgctttatccagacagcgttgtcggaactgattcacacactactatgatagatggcctgggtgttgctggatggggagttggtggaatagaagcagaagctgcaatgcttggccagcccatgagcatggtcctaccgggtgttgttgggttcaaattattaggcaaactacgagatggtgtcacagctactgacttggtgttgactgttactcaaatgctaagaaagcatggggttgttggcaagtttgtagagttttatggggaaggcatgagtgaactgtctttggcagatcgtgccactatagcaaacatgtctcctgagtatggtgcaaccatgggcttctttcctgtggatcatgtcactttgcaatatttgagactgactggcagaagtgatgagactgtttctatgatagaatcctatttacgagcaaataagatgtttgtggattatagcgagccccaagtggagagagtgtactcatcctatttggaactcaatcttgaggatgtagagccctgtgtctcaggtccaaaaaggcctcacgaccgtgtccctttgagagaaatgaaggtagactggcatgcctgcctcaacaataaagttggatttaagggttttgctgtatcaaaagaatctcagaataaggttgcagagttcacattccaagggacaccagcacatcttaggcatggtgatgttgttatagctgctatcaccagttgtacaaatacttcaaatcctagcgtaatgcttggagctgcattggttgcaaagaaagcatgtgaattgggattgcaggtgaagccatggattaaaacaagtcttgccccaggttctggtgttgtaactaagtatttgcagaggagtggcttgcagaagtatttgaatgagctagggtttaatatagttgggtatggatgcaccacatgcattggaaattcaggggatattaatgaagctgttgcatctgcgattaccgaaaatgatatagtagctgcagctgtattgtctggaaataggaactttgagggccgagttcacccattaacaagagctaattatcttgcttctcctcctcttgttgttgcctatgcccttgctggcacagtggacattgactttgacactgaacccattgggatagggaaggatggaacagagatcttcttcaaggatatttggccatccagtgaagaaatagcaaatgttgtacaatcaagtgtgctgcctgatatgtttagggacacatataatgcaatcacccaagggaatcccatgtggaataatttatctgttccaacgggcactctttatgcttgggaccctacatcgacttatattcatgagccaccttattttagagatatgagcatgtctcccccaggctctcatggagtgaaggatgcttactgtttgctcaactttggagacagtatcacaactgaccacatctctccagctggcagcatacataaggacagtcctgcggccagataccttatagaacgtggggttgatagacgggacttcaactcctatggaagtcgccgtggtaatgatgaggtgatggcccgaggaacgtttgccaatattcgcattgtcaacaaatttttgaatggagaagttggacctaaaactattcatattccttctggggagaagttgtcagtctttgacgttgcagagaaatacaagagtgaagggcatgatatgattatcttggctggtgctgagtatgggagtggaagctctcgtgattgggctgcaaaggggccaatgctactgggcgtgaaagctgtcatagcaaaaagttttgaaaggattcaccgaagtaatttggtgggaatgggtatcattcctttgtgttttaagcccggggaggatgctgattctcttggattaactggtcaagaacgttacaccattgatctaccaagcaatgtgaatgaaatacgacccggtcaagatgtcacagtggtgacagacaccgggaaatcatttgtatctacattgagatttgatactgaggttgaactagcttacttcaaccatggaggtatcttacaatatgtcatcagaaacttgatcaatgctaaacattga

SEQ ID NO: 169 - protein, 901 aa, Glycine max
MATENPFNSILRTLEKPGGAGEFGKYFSLPALNDPRIDRLPYSVRILLESAIRNCDEFQVKSNDIEKIIDWENTSPKLVEIPFKPARVLLQDFTGVPAVVDLACMRDAMNKLGGDSNKINPLVPVDLVIDHSVQVDVARSENAVQANMELEFQRNKERFGFLKWGSNAFNNMLVVPPGSGIVHQVNLEYLGRVVFNTNGVLYPDSVVGTDSHTTMIDGLGVAGWGVGGIEAEAAMLGQPMSMVLPGVVGFKLLGKLRDGVTATDLVLTVTQMLRKHGVVGKFVEFYGEGMSELSLADRATIANMSPEYGATMGFFPVDHVTLQYLRLTGRSDETVSMIESYLRANKMFVDYSEPQVERVYSSYLELNLEDVEPCVSGPKRPHDRVPLREMKVDWHACLNNKVGFKGFAVSKESQNKVAEFTFQGTPAHLRHGDVVIAAITSCTNTSNPSVMLGAALVAKKACELGLQVKPWIKTSLAPGSGVVTKYLQRSGLQKYLNELGFNIVGYGCTTCIGNSGDINEAVASAITENDIVAAAVLSGNRNFEGRVHPLTRANYLASPPLVVAYALAGTVDIDFDTEPIGIGKDGTEIFFKDIWPSSEEIANVVQSSVLPDMFRDTYNAITQGNPMWNNLSVPTGTLYAWDPTSTYIHEPPYFRDMSMSPPGSHGVKDAYCLLNFGDSITTDHISPAGSIHKDSPAARYLIERGVDRRDFNSYGSRRGNDEVMARGTFANIRIVNKFLNGEVGPKTIHIPSGEKLSVFDVAEKYKSEGHDMIILAGAEYGSGSSRDWAAKGPMLLGVKAVIAKSFERIHRSNLVGMGIIPLCFKPGEDADSLGLTGQERYTIDLPSNVNEIRPGQDVTVVTDTGKSFVSTLRFDTEVELAYFNHGGILQYVIRNLINAKH

SEQ ID NO: 170 - protein, 9 aa, Glycine max
FLNGEVGPK

SEQ ID NO: 171 - protein, 9 aa, Glycine max
LSVFDVAEK

SEQ ID NO: 172 - protein, 12 aa, Glycine max
TSLAPGSGVVTK

SEQ ID NO: 173 - DNA, 2292 bp, Glycine max
atggcatctcacatcgttggatacccccgtatgggtcccaagagagagctcaagttcgctctcgagtctttctgggatggcaagagcagcgccgaggatttgcagaaggtgtcttctgatctcagggcatccatctggaagcagatggctgatgctgggatcaagtacatccccagcaacactttctctcactatgaccaggttctcgacgccaccgccaccctcggtgccgttccaccaaggtacggctggaccggcggcgagattgggtttgatacctacttctccatggccagaggtaatgctaccgtgccagctatggagatgaccaagtggttcgacaccaactaccactttattgtccctgaattgggccctgatgtgaacttcacctatgcttctcacaaggctgttgatgaatacaaggaggccaaggcgcttggagtggataccgttccggtcctcgttggccctgttacatacctgttgctctccaagcctgccaagggagttgagaaatccttttctctcctctctctccttcccaaggttcttgctgtctacaaggaagttattgctgaccttaaggcagctggtgcttcatggattcagtttgatgagcctacccttgtcttggaccttgagtctcacaagttgcaagcattcactgacgcatatgcagaacttgcgcctgctttgtctggtttgaatgttcttgttgagacctactttgctgacatccctgctgaggcatacaagaccctcacatctctgaatggcgtcactgcatatggatttgatttggtccgtggaaccaacactcttgatttgatcaagggtggatttcccagcggaaaatacctctttgctggagtggttgatggaaggaacatctgggccaatgaccttgctgcttctctcactaccttgcagggtcttgagggcattgtgggcaaagataagcttgttgtgtccacctcctcctcccttcttcacactgctgttgatctagttaacgagaccaagttggatgatgagatcaagtcatggctagcttttgctgcccaaaaaattgttgaagttaacgcattggctaaagcattgtctggccacaaggatgaggccttcttctctggtaatgctgctgctctggcttcaaggaagtcttctccaagagtgaccaacgaggctgttcagaaggctgctgctgcattgaagggttcagatcatcgccgtgcaacaaatgtcagtgccagactggattctcaacaaaagaagctcaaccttccaatcctgccaaccaccactattggatccttccctcagactgtagaactgaggagggtacgccgtgaattcaaggctaacaagatctccgaggaagagtatgtaaagtcaattaaggaggaaattcgcaaagttgttgagcttcaagaagagcttgatattgatgttcttgttcatggagaaccagagagaaatgatatggttgagtacttcggtgaacaattgtcaggctttgccttcaccgttaatgggtgggtgcaatcctatggttcccgttgcgtgaagccaccgatcatctatggtgatgtgagccgcccaaagccaatgaccgtcttctggtcatctctggctcagagctttaccaagcgcccaatgaagggaatgcttaccggtcctgttaccattctcaactggtcctttgttagaaatgaccaacctagatctgagaccacctaccagattgctttgtctatcaaggacgaagtggaagaccttgaaaaggctggcatcactgttatccaaattgatgaagctgctttgagagagggtcttccactgaggaaatcagagcaagctcactacttggactgggctgtccatgccttcagaatcaccaatgttggtgtccaggataccacccagatccacactcacatgtgctactcgaatttcaacgacatcatccactccatcatcgacatggacgccgatgttatcaccattgagaactctcgctccgacgagaagcttctgtcagtcttccgcgaaggtgtgaagtatggtgctggaattggccctggtgtctatgacatccactccccaagaataccaccaactgaagaaattgctgacagaatcaacaagatgctggcagtgctcgagaagaacatcttgtgggtgaaccctgactgtgggctcaagacccgtaagtacactgaggtgaagccagccctcacaaacatggttgccgcagcaaaactcatccgcaacgaacttgccaagtga

SEQ ID NO: 174 - protein, 763 aa, Glycine max
MASHIVGYPRMGPKRELKFALESFWDGKSSAEDLQKVSSDLRASIWKQMADAGIKYIPSNTFSHYDQVLDATATLGAVPPRYGWTGGEIGFDTYFSMARGNATVPAMEMTKWFDTNYHFIVPELGPDVNFTYASHKAVDEYKEAKALGVDTVPVLVGPVTYLLLSKPAKGVEKSFSLLSLLPKVLAVYKEVIADLKAAGASWIQFDEPTLVLDLESHKLQAFTDAYAELAPALSGLNVLVETYFADIPAEAYKTLTSLNGVTAYGFDLVRGTNTLDLIKGGFPSGKYLFAGVVDGRNIWANDLAASLTTLQGLEGIVGKDKLVVSTSSSLLHTAVDLVNETKLDDEIKSWLAFAAQKIVEVNALAKALSGHKDEAFFSGNAAALASRKSSPRVTNEAVQKAAAALKGSDHRRATNVSARLDSQQKKLNLPILPTTTIGSFPQTVELRRVRREFKANKISEEEYVKSIKEEIRKVVELQEELDIDVLVHGEPERNDMVEYFGEQLSGFAFTVNGWVQSYGSRCVKPPIIYGDVSRPKPMTVFWSSLAQSFTKRPMKGMLTGPVTILNWSFVRNDQPRSETTYQIALSIKDEVEDLEKAGITVIQIDEAALREGLPLRKSEQAHYLDWAVHAFRITNVGVQDTTQIHTHMCYSNFNDIIHSIIDMDADVITIENSRSDEKLLSVFREGVKYGAGIGPGVYDIHSPRIPPTEEIADRINKMLAVLEKNILWVNPDCGLKTRKYTEVKPALTNMVAAAKLIRNELAK

SEQ ID NO: 175 - protein, 21 aa, Glycine max
AGITVIQIDEAALREGLPLRK

SEQ ID NO: 176 - protein, 24 aa, Glycine max
ALGVDTVPVLVGPVTYLLLSKPAK

SEQ ID NO: 177 - protein, 16 aa, Glycine max
DEAFFSGNAAALASRK

SEQ ID NO: 178 - protein, 8 aa, Glycine max
DEVEDLEK

SEQ ID NO: 179 - protein, 8 aa, Glycine max
ISEEEYVK

SEQ ID NO: 180 - protein, 9 aa, Glycine max
IVEVNALAK

SEQ ID NO: 181 - protein, 8 aa, Glycine max
LIRNELAK

SEQ ID NO: 182 - protein, 10 aa, Glycine max
LLSVFREGVK

SEQ ID NO: 183 - protein, 21 aa, Glycine max
LVVSTSSSLLHTAVDLVNETK

SEQ ID NO: 184 - protein, 10 aa, Glycine max
SFSLLSLLPK

SEQ ID NO: 185 - protein, 12 aa, Glycine max
SSPRVTNEAVQK

SEQ ID NO: 186 - protein, 26 aa, Glycine max
TLTSLNGVTAYGFDLVRGTNTLDLIK

SEQ ID NO: 187 - protein, 29 aa, Glycine max
YGAGIGPGVYDIHSPRIPPTEEIADRINK

SEQ ID NO: 188 - DNA, 2196 bp, Glycine max
atggcttcttccacttcctctatctctctctcccaagccctcctccgccccaccaccacctctctcccctcctcctcctcctccctccgcctcacccccactctccgccctaccccacccgccctctccctccgccgccgcctcaccacctccatccgcgccgccgcctccgtcaaaaccgtcgagaaggcaaccgcggacgccgcgctggtcgaaaaatccgtcaacacgatccgcttcctcgccatcgacgccgtcgagaaggcgaattcgggtcacccggggctccccatgggatgcgctccgatgggtcacgtgctatatgatgaaaccatgaagtataaccctaagaaccctttctggttcaaccgcgatcgcttcgttctctccgctgggcacgggtgcatgcttcagtacgcgcttctgcacctcgctgggttcgatagcgtcaaggaagaggatttgagggaatttcgccaatgggggagcagaactccgggacaccctgagaattttgagactccgggaattgaagttacaacaggtcctcttggtcaggggattgccaatgctgttggtttggcccttgcagagaagcacttggctgcaagatacaacaagcctgacaatgagattgttgaccattacacgtatgctattctgggtgatggttgtcaaatggagggaattgcaaatgaagcatgctcacttgctggccactggggactggggaagctgatagcattttatgatgacaatcatatttctattgatggtaacacagagattgcgttcaccgagagtgttgatagtcgttttgagggacttgggtggcatgttatttgggtaaagaatggaaataatggctatgatgatattcgtgctgccattaaggaagcaaaagctgtcaaagacaaacccacattaatcaaggtcacaacaaccattggttatggttctcctaacaaggctaactcctacagtgtgcatggaagtgcactgggtgccaaagaagttgatgccaccaggcagaaccttggatggtcacatgagccattccacgtgcctgaggatgtcaaaaagcattggagtcgccacacccctgagggtgctgcacttgaagctgagtggaatgctaagtttgctgagtatgaaaagaaatacaaggaggaggctgcagaattgaaatctattatcaatggtgaattccctgctggttgggagaaagcacttccgacatacactccagagagcccagcggatgccaccagaaacctgtctcaaacaaaccttaatgcccttgcaaaggttcttcccggtctgcttggtggcagtgcagatcttgcttcttccaacatgaccttgctcaaaatgttcggggacttccaaaaggatactccagcagagcgtaatgttagattcggtgttagagaacacggaatgggagctatctgcaacggcattgctcttcacagccctggactgattccatattgtgcaaccttctttgtattcactgactacatgagaggtgccataaggctttctgcgctgtctgaggctggggttatttatgtcatgacccatgattcaataggacttggagaagatgggccaacccaccagccaattgagcacctagcaagcttccgggcaatgccaaacattttgatgcttcgtcccgccgacggtaacgaaacagccggagcatacaaagtggccgtgctcaacaggaagagaccctccattcttgccctatccaggcaaaaactgccccagcttcccggaacttccattgaaggagttgaaaagggtggttacaccatttcggacaactccactggcaacaagcctgatgtcattttgatcggaactggttcggaattggaaatcgctgccaaagctgctgatgacctaaggaaggaagggaaggctgttagagttgtttcccttgtttcttgggaactttttgatgagcaatcagaagcctacaaggagagtgttttccctgctgctgtttcagccagagttagcattgaggcaggatcaacatttgggtgggagaaaattgttggagcaaagggaaaagcaataggcattgatcgttttggagctagtgctccagctggaagaatatacaaagaatttggtatcactaaggaagctgttgttgctgcagctaaagagcttatctag

SEQ ID NO: 189 - protein, 731 aa, Glycine max
MASSTSSISLSQALLRPTTTSLPSSSSSLRLTPTLRPTPPALSLRRRLTTSIRAAASVKTVEKATADAALVEKSVNTIRFLAIDAVEKANSGHPGLPMGCAPMGHVLYDETMKYNPKNPFWFNRDRFVLSAGHGCMLQYALLHLAGFDSVKEEDLREFRQWGSRTPGHPENFETPGIEVTTGPLGQGIANAVGLALAEKHLAARYNKPDNEIVDHYTYAILGDGCQMEGIANEACSLAGHWGLGKLIAFYDDNHISIDGNTEIAFTESVDSRFEGLGWHVIWVKNGNNGYDDIRAAIKEAKAVKDKPTLIKVTTTIGYGSPNKANSYSVHGSALGAKEVDATRQNLGWSHEPFHVPEDVKKHWSRHTPEGAALEAEWNAKFAEYEKKYKEEAAELKSIINGEFPAGWEKALPTYTPESPADATRNLSQTNLNALAKVLPGLLGGSADLASSNMTLLKMFGDFQKDTPAERNVRFGVREHGMGAICNGIALHSPGLIPYCATFFVFTDYMRGAIRLSALSEAGVIYVMTHDSIGLGEDGPTHQPIEHLASFRAMPNILMLRPADGNETAGAYKVAVLNRKRPSILALSRQKLPQLPGTSIEGVEKGGYTISDNSTGNKPDVILIGTGSELEIAAKAADDLRKEGKAVRVVSLVSWELFDEQSEAYKESVFPAAVSARVSIEAGSTFGWEKIVGAKGKAIGIDRFGASAPAGRIYKEFGITKEAVVAAAKELI

SEQ ID NO: 190 - protein, 18 aa, Glycine max
AIGIDRFGASAPAGRIYK

SEQ ID NO: 191 - protein, 27 aa, Glycine max
ALPTYTPESPADATRNLSQTNLNALAK

SEQ ID NO: 192 - protein, 14 aa, Glycine max
ANSYSVHGSALGAK

SEQ ID NO: 193 - protein, 10 aa, Glycine max
ATADAALVEK

SEQ ID NO: 194 - protein, 7 aa, Glycine max
DKPTLIK

SEQ ID NO: 195 - protein, 30 aa, Glycine max
GGYTISDNSTGNKPDVILIGTGSELEIAAK

SEQ ID NO: 196 - protein, 14 aa, Glycine max
LPQLPGTSIEGVEK

SEQ ID NO: 197 - protein, 14 aa, Glycine max
NGNNGYDDIRAAIK

SEQ ID NO: 198 - protein, 15 aa, Glycine max
SVNTIRFLAIDAVEK

SEQ ID NO: 199 - protein, 12 aa, Glycine max
VTTTIGYGSPNK

SEQ ID NO: 200 - DNA, 1797 bp, Glycine max
atggaagttccttcggaggtaccatctactgacactggcaccagcaccggcaccggcgaaaccatgagcaagaatgcgttgaagcgggagctgaagaacaaacagagagaagaagaaaggaagcgcaaggatgaggagaaggccaaaaaggcagctgaagcacaacaggcaaaggataacaaatctgcaccagctgatgatgaggatatggatccaactcaataccttgagaacaggctaaagtatcttgcagttcaaaagacagaagggaagaacccgtatcctcataaattctttgtcactatgtctattgatcaatacatcaaggaatatggaggtttaagcaacgggcaacacattgaggatgtctctgtgtctttggctggccggatcatgcacaaacgcacctctggttctaagcttgtcttttatgacctgcacggtggtggttgcaaggtccaggttatggctgatgctagtaaatcagacttggatgaggctggattttccaaattccattctaatgtgaagcgcggtgacatagttggtgtcactgggttcccaggcaaaagtaagaagggcgaacttagtatttttcccaagaattttgtgtcgctgtctcattgtttgcacatgatgccaaggcaaaagtctgctgctgctgctattgataatagaaatccatggataccgggaagtactaggaatcctgaaacatatattttgaaggatcaggaaactagatatcggttacgccatttggatttgatgcttaatccagaggttcgagacatattcaagaccaggtctaaaatcatttcttacattaggaggttccttgatgaccttgatttcttggaggttgaaacacctatgatgaatatgattgctggtggagctgcagcccgtccatttgtaacacatcacaatgatcttaacatgaggttattcatgaggattgctccagaactgtatcttaaggagttggttgttggtggactggatcgtgtttatgaaattggtaaacaatttaggaatgagggcatagatttgactcataatcctgagtttactacctgtgagttctatatggcttataaggactacaatgacttaatggatctaacagagcaaatgttgagtggtatggttaaggagcttacgaaaggcagctataaaatcaagtatcatgcagatgggattgataaggaacctattgaaattgactttactacaccttttagaaggattgacatgattgaagagttagagaagatggcaggtctaagtattcccaaagacttgtcaagtgaggaagccaatcaatatttgaaggatgcatgcgtgaagtatgagatcaaatgtcctccccctgagacaactgctcgtttgttggataaacttgtgggtcactttttggaagaaacgtgtgtaaatcctacattcatcaaaaaccatcctgagatcatgagtcctctagcaaagtggcacagatcaaaaccaggcctgactgaacgttttgaattgtttgttaataaacgtgaactttgcaatgcatatactgaattgaatgaccctgtagtacaacgacagagatttgctgaacaactcaaggatcggcaatctggcgatgatgaagcaatggccttagatgaaacattttgtacggctctagaatatggtttaccacctactggtggttggggtttgggcattgatcggttgaccatgttactgactgattcacagaatattaaggaggttcttctcttccctgccatgaaacctcaagactga

SEQ ID NO: 201 - protein, 598 aa, Glycine max
MEVPSEVPSTDTGTSTGTGETMSKNALKRELKNKQREEERKRKDEEKAKKAAEAQQAKDNKSAPADDEDMDPTQYLENRLKYLAVQKTEGKNPYPHKFFVTMSIDQYIKEYGGLSNGQHIEDVSVSLAGRIMHKRTSGSKLVFYDLHGGGCKVQVMADASKSDLDEAGFSKFHSNVKRGDIVGVTGFPGKSKKGELSIFPKNFVSLSHCLHMMPRQKSAAAAIDNRNPWIPGSTRNPETYILKDQETRYRLRHLDLMLNPEVRDIFKTRSKIISYIRRFLDDLDFLEVETPMMNMIAGGAAARPFVTHHNDLNMRLFMRIAPELYLKELVVGGLDRVYEIGKQFRNEGIDLTHNPEFTTCEFYMAYKDYNDLMDLTEQMLSGMVKELTKGSYKIKYHADGIDKEPIEIDFTTPFRRIDMIEELEKMAGLSIPKDLSSEEANQYLKDACVKYEIKCPPPETTARLLDKLVGHFLEETCVNPTFIKNHPEIMSPLAKWHRSKPGLTERFELFVNKRELCNAYTELNDPVVQRQRFAEQLKDRQSGDDEAMALDETFCTALEYGLPPTGGWGLGIDRLTMLLTDSQNIKEVLLFPAMKPQD

SEQ ID NO: 202 - protein, 12 aa, Glycine max
DLSSEEANQYLK

SEQ ID NO: 203 - DNA, 1728 bp, Glycine max
atgtaccgctttgcaacctccctcgcctccaaagctagaattgccaggagcagcactcaacagattggaagtagggtcacttggaacaggaattatgcggccaaagacattaagtttggtgtggaggctcgggctctgatgcttaagggtgtcgaagagctcgctgatgccgttaaagtaacaatgggccctaaggggcgtaatgtggttattgagcaaagttttggagcacctaaagtgacgaaagatggagtaaccgttgctaagagcattgaattcaaggacaaagtcaagaatatcggtgccagtcttgtaaagcaggttgctaatgctactaatgacgtggctggtgatggaaccacttgtgctacaattcttactaaagcaatatttacggaaggatgtaaatcagttgcagctggaatgaatgcgatggacctgagacgaggtataaatatggctgttgatgctgtggtgacaaatctgaaaagcagagcacgtatgattagcacttctgaagaaattgcccaggttggaacaatatctgccaatggggagagggaaattggtgagttaattgcaaaagctatggagaaagttggcaaagagggtgtcatcacaatctcagatggcaagacattgtacaatgagttggaagtcgttgaaggaatgaagctcgacaggggatacatttctccatatttcataacaaaccagaagaaccagaaatgtgaacttgaggatcctctcattataatccatgaaaagaaaatctcaagcataaatgctatcgttaaagtattagagttagctttgaagagacaaagatctttattgattgtcgccgaggatgtggaaagtgatgcccttgcaactcttattctaaataaacttcgtgctggaatcaaggtatgtgccatcaaagctcctggttttggtgaaaaccgtaaatctggtctccaggatcttgctgttcttacaggaggtcaacttatcaccgaagagcttggtttgaatcttgaaaaagtagacctggacttatttggctcttgcaagaagataacaatttctaaagatgacactgtcatccttgatggagctggtgataagaaagcaattgaggaaagatgtgagcagattagatcagcaattgaaaatagcacttcagattatgacaaggaaaagttacaggaaagattagccaagctttctgggggtgttgcagtactgaagattggaggagccagtgaggctgaagttggtgagaagaaggatagagtgacagatgccttaaatgcaaccaaggcagctgtagaggagggcatagtacctggtggtggtgttgctcttctttatgcatcgagtgagttggataagcttcaaactgccaactttgatcaaaagataggtgtccagatcatccaaaatgctttgaagactcctgtgcacacaattgcttcaaatgcaggagttgagggtgctgttgttgttggcaaactattggaacagaatgatcctgatcttggatatgatgcagccaaaggtgaatatgttgatatggttaaaactggaattattgatccattgaaggttattaggaccgccttggttgatgcagccagtgtgtcatctttgatgacaacaactgaagctgttgtgtctgaactcccgaaggacgataaagatgttcctgccatgggtggtggcatgggtggcatggattattaa

SEQ ID NO: 204 - protein, 575 aa, Glycine max
MYRFATSLASKARIARSSTQQIGSRVTWNRNYAAKDIKFGVEARALMLKGVEELADAVKVTMGPKGRNVVIEQSFGAPKVTKDGVTVAKSIEFKDKVKNIGASLVKQVANATNDVAGDGTTCATILTKAIFTEGCKSVAAGMNAMDLRRGINMAVDAVVTNLKSRARMISTSEEIAQVGTISANGEREIGELIAKAMEKVGKEGVITISDGKTLYNELEVVEGMKLDRGYISPYFITNQKNQKCELEDPLIIIHEKKISSINAIVKVLELALKRQRSLLIVAEDVESDALATLILNKLRAGIKVCAIKAPGFGENRKSGLQDLAVLTGGQLITEELGLNLEKVDLDLFGSCKKITISKDDTVILDGAGDKKAIEERCEQIRSAIENSTSDYDKEKLQERLAKLSGGVAVLKIGGASEAEVGEKKDRVTDALNATKAAVEEGIVPGGGVALLYASSELDKLQTANFDQKIGVQIIQNALKTPVHTIASNAGVEGAVVVGKLLEQNDPDLGYDAAKGEYVDMVKTGIIDPLKVIRTALVDAASVSSLMTTTEAVVSELPKDDKDVPAMGGGMGGMDY

SEQ ID NO: 205 - protein, 24 aa, Glycine max
AAVEEGIVPGGGVALLYASSELDK

SEQ ID NO: 206 - protein, 11 aa, Glycine max
DRVTDALNATK

SEQ ID NO: 207 - protein, 10 aa, Glycine max
EGVITISDGK

SEQ ID NO: 208 - protein, 14 aa, Glycine max
GRNVVIEQSFGAPK

SEQ ID NO: 209 - protein, 10 aa, Glycine max
GVEELADAVK

SEQ ID NO: 210 - protein, 12 aa, Glycine max
IGGASEAEVGEK

SEQ ID NO: 211 - protein, 11 aa, Glycine max
IGVQIIQNALK

SEQ ID NO: 212 - protein, 9 aa, Glycine max
ISSINAIVK

SEQ ID NO: 213 - protein, 15 aa, Glycine max
LLEQNDPDLGYDAAK

SEQ ID NO: 214 - protein, 9 aa, Glycine max
LQTANFDQK

SEQ ID NO: 215 - protein, 9 aa, Glycine max
LSGGVAVLK

SEQ ID NO: 216 - protein, 8 aa, Glycine max
NIGASLVK

SEQ ID NO: 217 - protein, 8 aa, Glycine max
TGIIDPLK

SEQ ID NO: 218 - protein, 20 aa, Glycine max
TPVHTIASNAGVEGAVVVGK

SEQ ID NO: 219 - DNA, 1725 bp, Glycine max
atgtatcgctttgcttctaacctcgcttccaaagcaaggattgctaggagtagcagccaccagattggaagtaggctgagttcgagcagaaactatgcggctaaagacattagatttggtgtggaggctcgggcactgatgcttaagggtgttgaagagctagctgatgctgtcaaagtaaccatgggtcccaaggggcgtaatgttgtgattgagcaaagttttggtgcccctaaagtaaccaaagatggagtaactgttgcaaagagcattgaattcaaggataaagttaagaatgttggtgccagtcttgtaaagcaggttgcaaatgctactaatgatgtggctggtgatggaaccacgtgcgctacagtccttacacgagcaatatttactgaaggctgcaaatcagttgcggctggaatgaatgcaatggacctgaggcgtggtataagtatggctgtcgatgctgtggtgacaaacttgaaaagcagagcaaggatgattagcacatctgaagaaatagcacaggtagggacaatatctgctaacggagagagagaaattggtgagttgattgcaaaagctatggagaaagttggcaaagagggagtaatcacaatttcagatggcaaaaccttatataatgagttggaagttgttgaaggaatgaagctcgacaggggctacatatctccttatttcattacaaatgataagaaccagaaatgtgaacttgaagatcccctcattctaattcatgagaagaaaatctcgagtataaatgctatagttaaagtcttagagttggctttgaagagacaaagatctttattgattattgccgaggatgtggaaagtgatgcacttgcaactcttattctaaataagcttcgggctggaattaaggtatgtgctattaaagcccctggttttggcgaaaataggaaagccaatcttcaagatcttgcagttctcacaggaggagcacttattactgaagagcttggcttgaagcttgaaaaagtggatttggatatgcttggcacctgtaaaaaaataacagtttctaaggatgacactgtcattcttgacggagcaggtgacaagaaagcacttgaggaaagatgcgagcagattaggtctgcaattgaaaacagcacctcagattatgacaaggaaaagttacaggaaagattagccaagctttctggtggtgttgccgtgcttaagattggaggagccagtgaagctgaagttggtgagaagaaggatagagtgacagatgccttaaatgcaactaaggctgctgtagaggaaggcattgtatcaggtggtggtgttgctcttctatatgcgtcaaaagagttggataaacttcaaactgctaactttgatcagaagattggtgtccagattatccaaaatgctttaaagacacctgtgctcacaattgcatcaaatgcgggtgttgagggtgcagttgttgttggcaaactattggaacaggagaatcatgatctaggatatgatgcagccaaaggtgaatatgttgatatggttaaagctggaatcatagaccctttgaaggtgattaggacagccttggttgatgcagccagtgtatcatctttgatgacaacaactgaagctgttgtgtctgaacttccaaacgatgataaagatactccagctatggctggtggcatgggtggcatgggttat

SEQ ID NO: 220 - protein, 575 aa, Glycine max
MYRFASNLASKARIARSSSHQIGSRLSSSRNYAAKDIRFGVEARALMLKGVEELADAVKVTMGPKGRNVVIEQSFGAPKVTKDGVTVAKSIEFKDKVKNVGASLVKQVANATNDVAGDGTTCATVLTRAIFTEGCKSVAAGMNAMDLRRGISMAVDAVVTNLKSRARMISTSEEIAQVGTISANGEREIGELIAKAMEKVGKEGVITISDGKTLYNELEVVEGMKLDRGYISPYFITNDKNQKCELEDPLILIHEKKISSINAIVKVLELALKRQRSLLIIAEDVESDALATLILNKLRAGIKVCAIKAPGFGENRKANLQDLAVLTGGALITEELGLKLEKVDLDMLGTCKKITVSKDDTVILDGAGDKKALEERCEQIRSAIENSTSDYDKEKLQERLAKLSGGVAVLKIGGASEAEVGEKKDRVTDALNATKAAVEEGIVSGGGVALLYASKELDKLQTANFDQKIGVQIIQNALKTPVLTIASNAGVEGAVVVGKLLEQENHDLGYDAAKGEYVDMVKAGIIDPLKVIRTALVDAASVSSLMTTTEAVVSELPNDDKDTPAMAGGMGGMGY

SEQ ID NO: 221 - protein, 8 aa, Glycine max
AGIIDPLK

SEQ ID NO: 222 - protein, 11 aa, Glycine max
DRVTDALNATK

SEQ ID NO: 223 - protein, 10 aa, Glycine max
EGVITISDGK

SEQ ID NO: 224 - protein, 14 aa, Glycine max
GRNVVIEQSFGAPK

SEQ ID NO: 225 - protein, 10 aa, Glycine max
GVEELADAVK

SEQ ID NO: 226 - protein, 12 aa, Glycine max
IGGASEAEVGEK

SEQ ID NO: 227 - protein, 11 aa, Glycine max
IGVQIIQNALK

SEQ ID NO: 228 - protein, 9 aa, Glycine max
ISSINAIVK

SEQ ID NO: 229 - protein, 15 aa, Glycine max
LLEQENHDLGYDAAK

SEQ ID NO: 230 - protein, 9 aa, Glycine max
LQTANFDQK

SEQ ID NO: 231 - protein, 9 aa, Glycine max
LSGGVAVLK

SEQ ID NO: 232 - DNA, 1869 bp, Glycine max
atggctcaagttcttgagaaccccaccattgacgcggcggcttccggcgcgaacccctcgctgacgaccatctcgttgtacgtcggggatcttcaccacgacgtcaacgatccgcagctgtatgatctcttcaaccaggttgcccaagtcgtttccgttcgaatttgcagggacgtggccacccaacaatcccttggttacggctacgtcaatttcagcaacgctcacgatgccgcaaaagcaattgatgtgctgaatttcactccactgaacggcaaaatcattaggataatgtactctattcgggaccctagtgctcggaagagtggtgcagctaatgttttcataaagaatttggacaaggcgattgatcacaaggctttgtacgatacattttcggcttttgggaatattctatcttgcaaggttgcgacagatgcttctggccagtctaaaggccatggttttgtgcagtttgagagtgaagaatctgcacaaaatgcaattgacaagttaaacggcatgctgatcaatgataagcaggtctttgtgggtcctttcctgcggaagcaggatagagagagtgctctcagtggcacaaagtttaataacgttttcgtgaaaaacctgttggattcaatgactgaggctgacttggagagaatttttggagaatatggagctattactagcgctgtagtgatgagagatgtagatggtaaatcaaaaggttttggttttgtcaattttgcaaatgtagacgatgctgctaaagctgtggaggctcttaatggaaagaattttgatggtaaggagtggtatgttggaaaagcccagaaaaagtctgaaagggagcttgaactgaaagggcaacatgaacagattacaaaggagactgttgataaatatcatggtacaaacttgtatatcaagaacttggatgatagtgttggtgatgaagaactcatggaactgttctctgagtttggtacgataacctcatgcaaggttatgcgagatccaaatggaattagtagaggatctggatttgtttcattttcaattgctgagggagcaactcgggctcttggtgagatgaatggtaaaatggttgctggcaaacctctctatgttgcccttgcacagagaaaagaagatagaagagcaaggttacaggcacaattttcacaatcgaggcctgctgcaataacccctaatgtttcacctcgaatgcctctataccctctaggggctcctgcgataggacaacaatttttgtatgggcaagcagctccagccacgatacctcaacattttgttcctggaatgaggccaggtggtgctccaaacttctatgttccactggttcagcagggtcaacagggacagcgcccaggaggacaccgaggatcaggtcctatgcaacagctccagcagccattgccattgatgcaccaacagatgcttccaaggggacatgtctatcgatatccttctggctccaatatgcaaaatattcaactggcaggagtacctggaggaatggtcacttatggcattggtcaacaaatgcccacgcaggccctggcctcggcccttgccaatgctactcctgaacagcagaggactatgcttggtgaagctttatacccgttagtagataagctggagcatgaagcagcagcaaaggttactggtatgctcttagagatggatcagcctgaggtattacatctgattgagtcaccggatgctctcaaggctaaagttgttgaggccatggatgtgttgaagaaagttacacagcagcaatcaaacagcccagccgatcaactggcttcactctctctgaatgataatgtcgagtct

SEQ ID NO: 233 - protein, 623 aa, Glycine max
MAQVLENPTIDAAASGANPSLTTISLYVGDLHHDVNDPQLYDLFNQVAQVVSVRICRDVATQQSLGYGYVNFSNAHDAAKAIDVLNFTPLNGKIIRIMYSIRDPSARKSGAANVFIKNLDKAIDHKALYDTFSAFGNILSCKVATDASGQSKGHGFVQFESEESAQNAIDKLNGMLINDKQVFVGPFLRKQDRESALSGTKFNNVFVKNLLDSMTEADLERIFGEYGAITSAVVMRDVDGKSKGFGFVNFANVDDAAKAVEALNGKNFDGKEWYVGKAQKKSERELELKGQHEQITKETVDKYHGTNLYIKNLDDSVGDEELMELFSEFGTITSCKVMRDPNGISRGSGFVSFSIAEGATRALGEMNGKMVAGKPLYVALAQRKEDRRARLQAQFSQSRPAAITPNVSPRMPLYPLGAPAIGQQFLYGQAAPATIPQHFVPGMRPGGAPNFYVPLVQQGQQGQRPGGHRGSGPMQQLQQPLPLMHQQMLPRGHVYRYPSGSNMQNIQLAGVPGGMVTYGIGQQMPTQALASALANATPEQQRTMLGEALYPLVDKLEHEAAAKVTGMLLEMDQPEVLHLIESPDALKAKVVEAMDVLKKVTQQQSNSPADQLASLSLNDNVES

SEQ ID NO: 234 - protein, 13 aa, Glycine max
AIDVLNFTPLNGK

SEQ ID NO: 235 - protein, 7 aa, Glycine max
FNNVFVK

SEQ ID NO: 236 - protein, 15 aa, Glycine max
GFGFVNFANVDDAAK

SEQ ID NO: 237 - protein, 9 aa, Glycine max
SGAANVFIK

SEQ ID NO: 238 - DNA, 1851 bp, Glycine max
atggattctgattatggtattcccagggaactctcagatcttcaaaagattcggtctttgtaccagccagagctccctccttgtctccagggaaccactgtgagggttgaatttggtgacgcaaccaccactgctgaccccactgatgcactcaccgtctgcagggcttttcctaacacttatggacaccctttggctcactttctcagggccactgccaaagtccctgatgctcagatcataactgagttccctcctattagggtggggattgtcttttgtgggagacaatctcctggagggcataatgtcatttggggtatccacaatgctctcaaaattcacaatcccaacagtgttttgcttggatttcttggtggttcagaaggtctatttgcccagaaaactctggagataactgacgatattctttcgacgtacaaaaatcaaggtggttatgatttgcttgggcggacgaaggatcaaattaggaccacagaacaagttaatgctgcacttgctgcatgcaacaatttgaaacttgatggccttgtcataatcggaggggtgacatcaaacacagatgctgcacagcttgctgaaacatttgttgtagcaaaatgccccacaaaggtggttggtgttcctgtcactctgaatggagatcttaaaaaccagtttgtagaaactaatgttggttttgatacaatttgtaaggttaattctcagctcatcagcaatgtctgcactgatgctctctctgcagagaagtattattatttcatccgtcttatgggacgcaaggcatcacacgttgctttggaatgcaccctccagtcccatccaaatatggtaattcttggtgaggaggttgctgcatcaaagcttaccctttctgaaattgcaaaacagattactgatgcaattcaggctagagcagagcaagacaaataccatggagtcattctccttccagaagggctgatagagagtattcctgaagtgtatgccctcttgaaggaaattcatggtttactcagacaaggtgttgaagttgacaagatatcttctcagctaacaccatgggcatctgctttatttgaatttctgccaccctttattaggagacagttgctcctttaccctgaatccgacgactcagcacagttatcacagattgaaactgagaaattactagcatatcttgtggaagtcgagattaacaagcgtctgaaagaaggcacatacaaggggaagaaattcaatgccatttgccacttttttggttatcaagctcgtggatctctgccatcaaaatttgactgtgattacgcatatgtccttgggcacatctgctaccatatactggccgctggtctaaatggatacatggcaactttaactaacctgaagaatccagtaaacaagtggaaatgtggggctgctccaattgcatctatgatgactgtaaagcgctggtctccaaatccaggagctacatcaattggaaaacctgctattcatccagctactgtggacttgagaggcaaagcatatgagctgttgagacaaaaggcacaaagctttcttatggatgacatctacagaaatccaggtccacttcagtttgatggtcccggcgcagatgccaaggttataactctttctgttgaagaccaggactacatgggccgcattaagaaacttcaggagtaccttgaacaggttcgaaccattgtcaagccaggatgccctcaggaggttttgaaagctgctctaagcgtcatggcgtcggttaccgaagttctagctgcaatgtcaacatcttataccaacaccctggcatccctg

SEQ ID NO: 239 - protein, 617 aa, Glycine max
MDSDYGIPRELSDLQKIRSLYQPELPPCLQGTTVRVEFGDATTTADPTDALTVCRAFPNTYGHPLAHFLRATAKVPDAQIITEFPPIRVGIVFCGRQSPGGHNVIWGIHNALKIHNPNSVLLGFLGGSEGLFAQKTLEITDDILSTYKNQGGYDLLGRTKDQIRTTEQVNAALAACNNLKLDGLVIIGGVTSNTDAAQLAETFVVAKCPTKVVGVPVTLNGDLKNQFVETNVGFDTICKVNSQLISNVCTDALSAEKYYYFIRLMGRKASHVALECTLQSHPNMVILGEEVAASKLTLSEIAKQITDAIQARAEQDKYHGVILLPEGLIESIPEVYALLKEIHGLLRQGVEVDKISSQLTPWASALFEFLPPFIRRQLLLYPESDDSAQLSQIETEKLLAYLVEVEINKRLKEGTYKGKKFNAICHFFGYQARGSLPSKFDCDYAYVLGHICYHILAAGLNGYMATLTNLKNPVNKWKCGAAPIASMMTVKRWSPNPGATSIGKPAIHPATVDLRGKAYELLRQKAQSFLMDDIYRNPGPLQFDGPGADAKVITLSVEDQDYMGRIKKLQEYLEQVRTIVKPGCPQEVLKAALSVMASVTEVLAAMSTSYTNTLASL

SEQ ID NO: 240 - protein, 13 aa, Glycine max
VVGVPVTLNGDLK

SEQ ID NO: 241 - DNA, 1575 bp, Glycine max
atgcccaaattttttcatagcattttcagaggaacaatggcgggtagggtttcgacgtgcttcttcttcgtgtttgctctttctctccttcttccttttcagatctccgctgaggaatcatcggagaaagagttcgtactcacattggatcactctaactttcacgacactgtcagcaagcacgatttcatcgtcgtcgagttctacgctccatggtgtggccactgtaagaagcttgctcccgagtatgagaaagctgcttctatcttgagtagtcatgatcctccggttgttttggctaaaattgatgccaatgaggagaagaacaaagaccttgcatctcaatatgatgttaggggatacccaacaattaagattctgagaaatgggggaaagaatgttcaggaatacaaaggtccccgtgaagcagatggcatcgttgactatttgaagaaacaaagtggtcctgcttcaactgaaattaaatctgctgatgaagctactgctttcattggtgaaaataaagttgctattgttggagttttcccgaaattttctggagaggagtttgacaacttttctgccttagcagagaagttgcgttctgactatgacttcggtcacactctgaatgccaaacaccttccaagaggagagtcatcagtttctggtcccgtagttaggttgttcaagccattcgatgaactttttgttgacttccaggatttcaatgtggaagctctagagaaatttgttgaggaatctagtacccctgttgttactgtctttaacaatgatccgagcaatcaccctttcgttgccaaattcttcaacagtcccaatgcaaaggcaatgttgttcatcaacttcactgccgaaggtgctgaatctttcaaatcaaaataccgtgaagctgctgagcaacataaacaacagggtgtaagctttttggtgggagatgttgagtctagtcaaggtgctttccagtattttggactgaaagaagaacaagtacctctaattatcattcaacacaatgacgggaaaaagttttttaaacccaatttggaagctgatcacattccaacttggttgaaggcgtacaaggatggtaatgttgcaccatttgtgaagtctgaacccattcctgaagctaacgatgaacctgttaaagtggtagttgggaacagtcttgaggacattgttttcaaatctgggaagaatgttctgctggagttttatgctccctggtgtggtcattgcaaacagttggctccaatattggacgaagttgctatctcatatcaaagtgatgctgatgttgttattgcaaaactggatgcaactgccaacgatatcccaagtgaaacctttgatgtccaaggttatccaaccgtgtacttcaggtcagcaagtggaaagttatcacaatacgaagggggtaggaccaaggaagacatcatagaattcatcgaaaagaaccgggacaaacctgctcagcaagaacaaggacaagataaacctgctcagcaagaacaaggacaagatgagcaagaaaaaggaaaagatgagctt

SEQ ID NO: 242 - protein, 525 aa, Glycine max
MPKFFHSIFRGTMAGRVSTCFFFVFALSLLLPFQISAEESSEKEFVLTLDHSNFHDTVSKHDFIVVEFYAPWCGHCKKLAPEYEKAASILSSHDPPVVLAKIDANEEKNKDLASQYDVRGYPTIKILRNGGKNVQEYKGPREADGIVDYLKKQSGPASTEIKSADEATAFIGENKVAIVGVFPKFSGEEFDNFSALAEKLRSDYDFGHTLNAKHLPRGESSVSGPVVRLFKPFDELFVDFQDFNVEALEKFVEESSTPVVTVFNNDPSNHPFVAKFFNSPNAKAMLFINFTAEGAESFKSKYREAAEQHKQQGVSFLVGDVESSQGAFQYFGLKEEQVPLIIIQHNDGKKFFKPNLEADHIPTWLKAYKDGNVAPFVKSEPIPEANDEPVKVVVGNSLEDIVFKSGKNVLLEFYAPWCGHCKQLAPILDEVAISYQSDADVVIAKLDATANDIPSETFDVQGYPTVYFRSASGKLSQYEGGRTKEDIIEFIEKNRDKPAQQEQGQDKPAQQEQGQDEQEKGKDEL

SEQ ID NO: 243 - protein, 16 aa, Glycine max
AASILSSHDPPVVLAK

SEQ ID NO: 244 - protein, 9 aa, Glycine max
DGNVAPFVK

SEQ ID NO: 245 - protein, 15 aa, Glycine max
DLASQYDVRGYPTIK

SEQ ID NO: 246 - protein, 9 aa, Glycine max
EDIIEFIEK

SEQ ID NO: 247 - protein, 15 aa, Glycine max
EEQVPLIIIQHNDGK

SEQ ID NO: 248 - protein, 17 aa, Glycine max
EFVLTLDHSNFHDTVSK

SEQ ID NO: 249 - protein, 16 aa, Glycine max
FFKPNLEADHIPTWLK

SEQ ID NO: 250 - protein, 8 aa, Glycine max
FFNSPNAK

SEQ ID NO: 251 - protein, 15 aa, Glycine max
FSGEEFDNFSALAEK

SEQ ID NO: 252 - protein, 25 aa, Glycine max
FVEESSTPVVTVFNNDPSNHPFVAK

SEQ ID NO: 253 - DNA, 1509 bp, Glycine max
atggcgggtacggtttcgacttgtttcttcttcgtgtttcttctttctctccttcttccttttcagatctccgctgaggaatcctcggagaaggagttcgtactcacattggatcactctaactttcacgacactgtcagcaagcacgatttcatcgtcgtcgagttctacgccccatggtgtggtcactgtaagaagcttgctccggagtatgagaaagctgcttctatcttgagtagtcatgatcctcctattgttttggctaaagtagatgccaatgaggagaagaacaaagaccttgcatcacaatatgatgttaagggattcccaacaattaatattctgagaaatgggggaaagaatgttcaggaatacaaaggtccccgtgaagcagatggcatcgttgactatttgaagaaacaaagtggtcctgcttcaactgaaattaaatctgctgatgaagctactgcttttattggtgaaaataaagttgctattgttggagttttcccgaaattttctggagaggagtttgacaacttttctgccttagcagagaagttgcgttctgattatgactttggtcacactctgaatgccaaactccttccaagaggagagtcatcagtttctgggcccgtagttaggctgttcaagccattcgatgaactttttgttgacttccaggatttcaatgtggaagctctagagaagtttgttgaggaatctagtacccctgttgttactgtctttaacaatgaaccgagcaatcaccctttcgttgtcaaattcttcaacagtcccaacgcaaaggcaatgttgttcatcaacttcactgccgaaggtgctgaagctatcaaatcaaaataccgtgaagctgctgagcaatataaacaacagggtgtcagctttttggtgggagatgttgagtctagtcaaggtgctttccagtattttggactgaaagaagagcaagtacctctaattatcattcaacataatgatgggaaaaagttttttaaacccaatttggaagctgatcacattccaacctggttgaaggcatacaaggatggtcatgttgcaccatttgttaagtctgaacccattcccgagactaacgatgaacctgttaaagtggtagttggggccagtcttgaggacattgttttcaaatctgggaagaatgttctgctggagttttatgctccctggtgtggtcattgcaaacagttggctccaatattggatgaagttgctatctcatatcaaaatgaagctgatgttgttattgcaaaactggatgcaactgccaacgatatcccaagtgaaacctttgatgtccaaggttatcctaccgtgtacttcaggtcagcaagtggaaagttatcacaatacgacggcggtaggaccaaggaagacatcatagaattcatcgaaaagaaccgggataaacctgctcagcaagaacaaggaaaagatgagcaagaacaaggaaaagatgagctt

SEQ ID NO: 254 - protein, 503 aa, Glycine max
MAGTVSTCFFFVFLLSLLLPFQISAEESSEKEFVLTLDHSNFHDTVSKHDFIVVEFYAPWCGHCKKLAPEYEKAASILSSHDPPIVLAKVDANEEKNKDLASQYDVKGFPTINILRNGGKNVQEYKGPREADGIVDYLKKQSGPASTEIKSADEATAFIGENKVAIVGVFPKFSGEEFDNFSALAEKLRSDYDFGHTLNAKLLPRGESSVSGPVVRLFKPFDELFVDFQDFNVEALEKFVEESSTPVVTVFNNEPSNHPFVVKFFNSPNAKAMLFINFTAEGAEAIKSKYREAAEQYKQQGVSFLVGDVESSQGAFQYFGLKEEQVPLIIIQHNDGKKFFKPNLEADHIPTWLKAYKDGHVAPFVKSEPIPETNDEPVKVVVGASLEDIVFKSGKNVLLEFYAPWCGHCKQLAPILDEVAISYQNEADVVIAKLDATANDIPSETFDVQGYPTVYFRSASGKLSQYDGGRTKEDIIEFIEKNRDKPAQQEQGKDEQEQGKDEL

SEQ ID NO: 255 - protein, 16 aa, Glycine max
AASILSSHDPPIVLAK

SEQ ID NO: 256 - protein, 9 aa, Glycine max
DGHVAPFVK

SEQ ID NO: 257 - protein, 9 aa, Glycine max
DLASQYDVK

SEQ ID NO: 258 - protein, 9 aa, Glycine max
EDIIEFIEK

SEQ ID NO: 259 - protein, 15 aa, Glycine max
EEQVPLIIIQHNDGK

SEQ ID NO: 260 - protein, 17 aa, Glycine max
EFVLTLDHSNFHDTVSK

SEQ ID NO: 261 - protein, 16 aa, Glycine max
FFKPNLEADHIPTWLK

SEQ ID NO: 262 - protein, 8 aa, Glycine max
FFNSPNAK

SEQ ID NO: 263 - protein, 15 aa, Glycine max
FSGEEFDNFSALAEK

SEQ ID NO: 264 - protein, 25 aa, Glycine max
FVEESSTPVVTVFNNEPSNHPFVVK

SEQ ID NO: 265 - protein, 13 aa, Glycine max
GFPTINILRNGGK

SEQ ID NO: 266 - protein, 13 aa, Glycine max
GPREADGIVDYLK

SEQ ID NO: 267 - protein, 7 aa, Glycine max
LAPEYEK

SEQ ID NO: 268 - protein, 29 aa, Glycine max
LDATANDIPSETFDVQGYPTVYFRSASGK

SEQ ID NO: 269 - protein, 14 aa, Glycine max
LRSDYDFGHTLNAK

SEQ ID NO: 270 - protein, 10 aa, Glycine max
LSQYDGGRTK

SEQ ID NO: 271 - protein, 23 aa, Glycine max
QLAPILDEVAISYQNEADVVIAK

SEQ ID NO: 272 - protein, 24 aa, Glycine max
QQGVSFLVGDVESSQGAFQYFGLK

SEQ ID NO: 273 - protein, 10 aa, Glycine max
QSGPASTEIK

SEQ ID NO: 274 - protein, 13 aa, Glycine max
SADEATAFIGENK

SEQ ID NO: 275 - protein, 13 aa, Glycine max
SEPIPETNDEPVK

SEQ ID NO: 276 - protein, 9 aa, Glycine max
VAIVGVFPK

SEQ ID NO: 277 - protein, 13 aa, Glycine max
VVVGASLEDIVFK

SEQ ID NO: 278 - protein, 9 aa, Glycine max
YREAAEQYK

SEQ ID NO: 279 - DNA, 1467 bp, Glycine max
atgggtgtggctcaaaacattcccgatgcggaggagggaaccttggagattggaatggaatacagaactgtttctggagttgctgggccattggtcattcttgataaagttaagggacccaagtttcaagagattgttaacattcgcttaggagatggtactactcggcgtggacaagtgctagaagttgatggtgaaaaggctgttgttcaggtctttgagggtacatctgggattgacaataaatttacaactgtgcaatttactggagaggtgttaaaaactccagtatcattggacatgcttggccgcatattcaatggttctggaaaaccaattgataatggtccacccattttacctgaggcttacttggacatatcaggaagttccatcaaccctagtgagagaacctatccagaggagatgatacagacaggaatatctaccattgatgtcatgaattctattgctagaggtcaaaagatccctctattctcagctgctggtctcccccataatgaaattgctgcacagatatgccgtcaggctggcttagtcaagcgactagaaaagtctgataatcttctcgagggtggaggagaagaggacaattttgccattgtgtttgcagctatgggagttaacatggagactgcacagtttttcaaacgtgactttgaggaaaatggctcgatggagagagtgacccttttccttaatctggcaaatgatcctacgattgagcgtatcatcactcctcgtattgctcttactactgctgaatatttggcatatgaatgtggcaagcatgttcttgtgatactaactgatatgagttcttatgctgatgctcttcgtgaggtatctgctgcccgagaagaagtacctggtagacgtgggtatcccggctacatgtatacagatcttgcaacaatatacgaacgtgctggaagaattgaggggcgaaaaggctctattacacaaattccaattctaaccatgcctaatgatgatattacgcatccaactcctgatcttacaggatatattactgagggacagatatatatcgacagacagttgtataacaggcagatatatcctccaatcaatgtccttccatcattgtctcgtttgatgaagagtgccattggtgagggaatgacacgaaaggatcattctgatgtgtccaaccagctctatgcaaattatgccattggaaaggatgtccaggcaatgaaagccgtggtcggagaagaagcactttcatctgaggacctgctgtatttggaatttttggagaagtttgagaggaagtttgttgcccaaggagcatacgatacacgcaatatcttccagtcactagatcttgcatggactttgcttcggattttccctcgcgagcttctccaccgtattcctgcaaagactcttgatcagttctacagccgagatgccagtaac

SEQ ID NO: 280 - protein, 489 aa, Glycine max
MGVAQNIPDAEEGTLEIGMEYRTVSGVAGPLVILDKVKGPKFQEIVNIRLGDGTTRRGQVLEVDGEKAVVQVFEGTSGIDNKFTTVQFTGEVLKTPVSLDMLGRIFNGSGKPIDNGPPILPEAYLDISGSSINPSERTYPEEMIQTGISTIDVMNSIARGQKIPLFSAAGLPHNEIAAQICRQAGLVKRLEKSDNLLEGGGEEDNFAIVFAAMGVNMETAQFFKRDFEENGSMERVTLFLNLANDPTIERIITPRIALTTAEYLAYECGKHVLVILTDMSSYADALREVSAAREEVPGRRGYPGYMYTDLATIYERAGRIEGRKGSITQIPILTMPNDDITHPTPDLTGYITEGQIYIDRQLYNRQIYPPINVLPSLSRLMKSAIGEGMTRKDHSDVSNQLYANYAIGKDVQAMKAVVGEEALSSEDLLYLEFLEKFERKFVAQGAYDTRNIFQSLDLAWTLLRIFPRELLHRIPAKTLDQFYSRDASN

SEQ ID NO: 281 - protein, 17 aa, Glycine max
DHSDVSNQLYANYAIGK

SEQ ID NO: 282 - protein, 26 aa, Glycine max
FQEIVNIRLGDGTTRRGQVLEVDGEK

SEQ ID NO: 283 - protein, 12 aa, Glycine max
FTTVQFTGEVLK

SEQ ID NO: 284 - protein, 12 aa, Glycine max
TLDQFYSRDASN

SEQ ID NO: 285 - DNA, 1464 bp, Glycine max
atgggtgtggctgagaacattcccgatatggaggagggtaccttggagattggaatggaatacagaactgtatctggagttgctggaccattggtcattcttgacaaagttaagggacccaaatttcaagagattgttaatattcgtttaggagatggaactactcggcgtggacaagttctagaggttgatggcgaaaaggctgttgttcaggtatttgaaggcacatctgggatcgacaataagtttacaactgtgcaatttactggagaggtgttaaaaactcctgtctcactggacatgcttggacgcatatttaatggttctggaaaaccaattgataatggtccaccaattttacctgaggcttacctggatatttctggaagttccatcaatcctagtgagagaacctatcctgaggagatgatacagacaggaatatctacaattgatgtcatgaattctattgctagaggtcaaaagatccctctattctcagcagctggtctcccccataatgaaattgctgcacagatctgtcgtcaggctggcttagtcaagcgactagagaaatctgataatcttcttgagggtggagaagaggacaattttgctattgtgtttgcagctatgggagttaacatggagactgcacagtttttcaagcgtgactttgaggagaatggatcaatggagagagtgactcttttccttaatttggcaaatgatcctacaattgagcgtattatcactcctcgtattgctcttactactgctgaatatttggcttatgaatgtggcaagcacgttcttgtgatactcacagacatgagttcttatgctgatgctcttcgtgaggtatctgctgcccgagaagaagtgccgggtagacgtggttatcctggatatatgtatacagatcttgcaacaatttatgaacgagctgggagaattgaggggcgtaaaggctctattacacaaattccaattctaaccatgcccaatgatgatattacgcacccaactcctgatctaacaggatatatcactgaggggcagatatacatcgacaggcagctgtataatagacagatatacccaccaatcaacgtcctcccatcactatctcggttgatgaagagtgctattggtgagggaatgactagaagggatcattctgatgtgtccaaccagctctatgcaaattatgctattggaaaggatgtccaggcaatgaaagcagtggttggagaagaagcactttcatctgaggacctgctgtatctggaatttttggagaagtttgagaggaagtttgttgcccagggagcctatgacacccgcaatatattccagtcacttgatcttgcatggactttactccggattttccctcgtgaacttcttcatcgtataccagccaagactcttgaccagttttacagcagagatgctggtaat

SEQ ID NO: 286 - protein, 488 aa, Glycine max
MGVAENIPDMEEGTLEIGMEYRTVSGVAGPLVILDKVKGPKFQEIVNIRLGDGTTRRGQVLEVDGEKAVVQVFEGTSGIDNKFTTVQFTGEVLKTPVSLDMLGRIFNGSGKPIDNGPPILPEAYLDISGSSINPSERTYPEEMIQTGISTIDVMNSIARGQKIPLFSAAGLPHNEIAAQICRQAGLVKRLEKSDNLLEGGEEDNFAIVFAAMGVNMETAQFFKRDFEENGSMERVTLFLNLANDPTIERIITPRIALTTAEYLAYECGKHVLVILTDMSSYADALREVSAAREEVPGRRGYPGYMYTDLATIYERAGRIEGRKGSITQIPILTMPNDDITHPTPDLTGYITEGQIYIDRQLYNRQIYPPINVLPSLSRLMKSAIGEGMTRRDHSDVSNQLYANYAIGKDVQAMKAVVGEEALSSEDLLYLEFLEKFERKFVAQGAYDTRNIFQSLDLAWTLLRIFPRELLHRIPAKTLDQFYSRDAGN

SEQ ID NO: 287 - protein, 26 aa, Glycine max
FQEIVNIRLGDGTTRRGQVLEVDGEK

SEQ ID NO: 288 - protein, 12 aa, Glycine max
FTTVQFTGEVLK

SEQ ID NO: 289 - protein, 12 aa, Glycine max
TLDQFYSRDAGN

SEQ ID NO: 290 - DNA, 1407 bp, Glycine max
atggccaccgctgccgagaaactctccgctctcaaatccgccgtcgccggattgaacgaaatcagtgagaatgagaagaacggattcatcagcctcgtcggccgctatctcagtggcgaagcgcagcatgtggaatggagcaagatccagacgcctacggacgaagtggttgtgccttacgacactttggcgccaactcctgaaggttcttcggaggtgaagaatctattggacaagcttgtggtgttgaagctaaatggaggcttgggaacaactatgggttgcactggtcctaaatctgtaattgaagttcgtgatgggttgacatttctagatttaattgtcatccaaattgagaatctcaattccaaatatggaagcaatgttcctttgcttttgatgaattcattcaacactcatgatgacactcaaaagattgttgaaaaataccaaaactcaaatattgagattcatacttttaaccagagccagtatcctcgattggttgttgaggactttttgccattgccttccaaagggcatactgacaaggatggatggtaccctcctggccatggtgatgtcttcccatcattattgaacagtggcaaacttgatgcactattgtcacagggtaaagagtatgtgtttgttgccaattcggataacttgggagctatagttgacttgaaaatcttgaatcatttgatccagaacaagaatgaatactgtatggaggtgactcccaaaacattggctgatgtaaagggtggcactttgatttcttacgaaggaagggttcagctcctggaaattgcacaagtccccgatgaacatgtcaatgagttcaagtcaatagagaagttcaaaattttcaacacaaataatttgtgggtgaacttaaacgcagttaaaaggcttgttgaagctgatgctcttaagatggaaattattcccaatccaaaggaagttgacggaataaaagttcttcagctggaaactgcagctggtgctgcaataaggttctttgacaaggctattgggattaatgttcctcgatcacgattccttcctgtgaaggcaacttcagatttgcttcttgtccagtctgacctctacactttggaagacggatttgtcattcggaacaaagctagggaaaatcctgaaaacccttctattgaactgggaccagaatttaagaaggttagcaacttcttgggccgcttcaagtcaattcctagtatcgttgagcttgacagtctaaaagtggctggtgatgtatggtttggagctggtgttatcctcaaggggaaagtcagcattgtatcaaagcccggtgtaaagctggaagttcccgacggtgttgccattgtagacaaggaaattaatggcccagaggacctg

SEQ ID NO: 291 - protein, 469 aa, Glycine max
MATAAEKLSALKSAVAGLNEISENEKNGFISLVGRYLSGEAQHVEWSKIQTPTDEVVVPYDTLAPTPEGSSEVKNLLDKLVVLKLNGGLGTTMGCTGPKSVIEVRDGLTFLDLIVIQIENLNSKYGSNVPLLLMNSFNTHDDTQKIVEKYQNSNIEIHTFNQSQYPRLVVEDFLPLPSKGHTDKDGWYPPGHGDVFPSLLNSGKLDALLSQGKEYVFVANSDNLGAIVDLKILNHLIQNKNEYCMEVTPKTLADVKGGTLISYEGRVQLLEIAQVPDEHVNEFKSIEKFKIFNTNNLWVNLNAVKRLVEADALKMEIIPNPKEVDGIKVLQLETAAGAAIRFFDKAIGINVPRSRFLPVKATSDLLLVQSDLYTLEDGFVIRNKARENPENPSIELGPEFKKVSNFLGRFKSIPSIVELDSLKVAGDVWFGAGVILKGKVSIVSKPGVKLEVPDGVAIVDKEINGPEDL

SEQ ID NO: 292 - protein, 15 aa, Glycine max
AIGINVPRSRFLPVK

SEQ ID NO: 293 - protein, 17 aa, Glycine max
ARENPENPSIELGPEFK

SEQ ID NO: 294 - protein, 24 aa, Glycine max
ATSDLLLVQSDLYTLEDGFVIRNK

SEQ ID NO: 295 - protein, 8 aa, Glycine max
EINGPEDL

SEQ ID NO: 296 - protein, 18 aa, Glycine max
EYVFVANSDNLGAIVDLK

SEQ ID NO: 297 - protein, 9 aa, Glycine max
ILNHLIQNK

SEQ ID NO: 298 - protein, 26 aa, Glycine max
IQTPTDEVVVPYDTLAPTPEGSSEVK

SEQ ID NO: 299 - protein, 9 aa, Glycine max
LDALLSQGK

SEQ ID NO: 300 - protein, 9 aa, Glycine max
RLVEADALK

SEQ ID NO: 301 - protein, 14 aa, Glycine max
SAVAGLNEISENEK

SEQ ID NO: 302 - protein, 12 aa, Glycine max
SIPSIVELDSLK

SEQ ID NO: 303 - protein, 17 aa, Glycine max
VLQLETAAGAAIRFFDK

SEQ ID NO: 304 - protein, 9 aa, Glycine max
VSNFLGRFK

SEQ ID NO: 305 - DNA, 1353 bp, Glycine max
atgaccaccgccaccgagaagctctccgctctcaaatccgccgtcgccggattgaacgaaatcagtgagagtgagaagaacggattcatcagcctcgtcagccgctatctcagtggcgaagcgcagcatgtggaatggagcaagatccagacgcctacggacgaagtggttgtgccttacgacactttggcgccaactcctgatggttcttcggacgtgaagaatctattggacaagcttgtggtgttgaagctaaatggaggcttgggcacaactatgggttgcactggtcctaaatctgtaattgaagttcgtgatgggttgacatttctagatttaattgtgatccagattgagaatctcaattccaaatatggaagcaatgttcctttgcttttgatgaattcattcaacactcatgatgacactcaaaagattgttgaaaaataccaaaactccaatattgagattcatacttttaaccagggcatactgacaaggatggatggtaccctcctggcccatggagatgtctttccatcattattgaacagtggcaaacttgatgcactattgtcacagggtaaagagtatgtatttgttgccaattcagataacttgggagctatagttgacttgaaaatcttaaatcatttgatccagaacaagaatgaatactgtatggaggtgactcccaaaacattggctgatgtaaagggtggcactttgatttcttacgaaggaaggcttttggaaattgcacaagtcccagatgaacatgtcaatgagttcaagtcaatagagaagttcaaaattttcaacacaaataatttgtgggtgaacttaaatgcagttaaaaggcttgttgaagctgatgctcttaagatggaaattattcccaatccaaaggaagttgatggaataaaagttcttcagctggaaactgcagctggtgctgcaataaggttctttgacaaggctattgggattaatgttcctcgatcacgattccttcctgtgaaggcaacttcagatttgcttcttgtccagtctgacctctacactttggaagatggatttgtcattcggaacaaagctagggcaaatcctgaaaacccttctattgaacttgggccagaatttaagaaggttagcaacttcttgggccgcttcaagtcaattcccagtattgttgagcttgacagtctaaaagtggctggcaatgtatggtttggagctggtgttatcctcaagggaaaaatcagtatcgtggccaatcctggtgttaagctggaagttcccgatggtgctgtcatttcggataaggaaattaatggcccagaggacctcctg

SEQ ID NO: 306 - protein, 451 aa, Glycine max
MTTATEKLSALKSAVAGLNEISESEKNGFISLVSRYLSGEAQHVEWSKIQTPTDEVVVPYDTLAPTPDGSSDVKNLLDKLVVLKLNGGLGTTMGCTGPKSVIEVRDGLTFLDLIVIQIENLNSKYGSNVPLLLMNSFNTHDDTQKIVEKYQNSNIEIHTFNQGILTRMDGTLLAHGDVFPSLLNSGKLDALLSQGKEYVFVANSDNLGAIVDLKILNHLIQNKNEYCMEVTPKTLADVKGGTLISYEGRLLEIAQVPDEHVNEFKSIEKFKIFNTNNLWVNLNAVKRLVEADALKMEIIPNPKEVDGIKVLQLETAAGAAIRFFDKAIGINVPRSRFLPVKATSDLLLVQSDLYTLEDGFVIRNKARANPENPSIELGPEFKKVSNFLGRFKSIPSIVELDSLKVAGNVWFGAGVILKGKISIVANPGVKLEVPDGAVISDKEINGPEDLL

SEQ ID NO: 307 - protein, 15 aa, Glycine max
AIGINVPRSRFLPVK

SEQ ID NO: 308 - protein, 24 aa, Glycine max
ATSDLLLVQSDLYTLEDGFVIRNK

SEQ ID NO: 309 - protein, 18 aa, Glycine max
EYVFVANSDNLGAIVDLK

SEQ ID NO: 310 - protein, 9 aa, Glycine max
ILNHLIQNK

SEQ ID NO: 311 - protein, 26 aa, Glycine max
IQTPTDEVVVPYDTLAPTPDGSSDVK

SEQ ID NO: 312 - protein, 9 aa, Glycine max
LDALLSQGK

SEQ ID NO: 313 - protein, 12 aa, Glycine max
LEVPDGAVISDK

SEQ ID NO: 314 - protein, 9 aa, Glycine max
RLVEADALK

SEQ ID NO: 315 - protein, 14 aa, Glycine max
SAVAGLNEISESEK

SEQ ID NO: 316 - protein, 12 aa, Glycine max
SIPSIVELDSLK

SEQ ID NO: 317 - protein, 17 aa, Glycine max
VLQLETAAGAAIRFFDK

SEQ ID NO: 318 - protein, 9 aa, Glycine max
VSNFLGRFK

SEQ ID NO: 319 - DNA, 1332 bp, Glycine max
atggatgaggagtacgatgtgatcgtgttgggcacgggtctcaaggagtgcattctcagcggtcttctctccgtcgatggcctcaaggttctgcacatggacaggaatgactattacggaggagaatccacttcgctcaatcttattcagctttggaagagattcaggggagatgacaagcctcctccacatttgggagctagcagggactataacatcgatatgaaccctaagtttattatggctaatggcaatttggtgcgggttctcatacatactgatgttactaagtatctctctttcaaagctgtggatgggagctttgtgtttaataaaggaaaggttcataaggtgcccgcaaatgacatggaggccttgaagtctccacttatggggctatttgaaaaacgccgagcacgcaagtttttcatttatgtgcaaaattacaatgagagtgatcccaagacccatgaagggatggacttgacaagagtgactactaaagagttgatagcaaaatacggtcttgatgataacactatagacttcattggtcatgctttggcgcttcatagtgatgatcgctacttggctgagccagcactggacactgtgaagagaatgaagttatatgcagagtctcttgcacgctttcaaggagggtcaccttacatatatcctttgtatggtttaggagagcttccccaggcatttgcacggcttagtgctgtttatggtgggacatatatgttgaataagcctgagtgcaaggtagaatttgatgaggaaggaaaggttgttggtgtcacatctgaaggggaaactgcaaagtgcaaaaaagttgtttgtgatccatcatatttgcccggcaaggtgaggaaggttggtagggttgcaagagcaatagccataatgagtcacccaatccccagcactgatgattcccattcggtgcaaattattttaccacagaaacagttgggtcggaagtcagacatgtacctattttgttgttcatatactcacaatgttgctccaaagggaaaatttattgcatttgtatcaaccgaggcagagacagatcagccagcaattgaactaaaacctggaattgaccttctaggacctgttgatgagatattttttgatatctatgacagatatgaaccggtcaatgaacccactttggacaactgctttgtatcaacaagttatgatgctactactcactttgagtcgaccgtggatgatgttctcaacatgtatacattgataactggaaaggttattgacctgagtgtggatcttagtgctgctagtgctgcagaagag

SEQ ID NO: 320 - protein, 444 aa, Glycine max
MDEEYDVIVLGTGLKECILSGLLSVDGLKVLHMDRNDYYGGESTSLNLIQLWKRFRGDDKPPPHLGASRDYNIDMNPKFIMANGNLVRVLIHTDVTKYLSFKAVDGSFVFNKGKVHKVPANDMEALKSPLMGLFEKRRARKFFIYVQNYNESDPKTHEGMDLTRVTTKELIAKYGLDDNTIDFIGHALALHSDDRYLAEPALDTVKRMKLYAESLARFQGGSPYIYPLYGLGELPQAFARLSAVYGGTYMLNKPECKVEFDEEGKVVGVTSEGETAKCKKVVCDPSYLPGKVRKVGRVARAIAIMSHPIPSTDDSHSVQIILPQKQLGRKSDMYLFCCSYTHNVAPKGKFIAFVSTEAETDQPAIELKPGIDLLGPVDEIFFDIYDRYEPVNEPTLDNCFVSTSYDATTHFESTVDDVLNMYTLITGKVIDLSVDLSAASAAEE

SEQ ID NO: 321 - protein, 10 aa, Glycine max
AVDGSFVFNK

SEQ ID NO: 322 - protein, 14 aa, Glycine max
FFIYVQNYNESDPK

SEQ ID NO: 323 - protein, 8 aa, Glycine max
VEFDEEGK

SEQ ID NO: 324 - protein, 16 aa, Glycine max
VIDLSVDLSAASAAEE

SEQ ID NO: 325 - protein, 12 aa, Glycine max
VVGVTSEGETAK

SEQ ID NO: 326 - DNA, 1332 bp, Glycine max
atggatgaggagtacgatgtgatcgtgttgggcacgggtctcaaggagtgcattctcagcggtcttctctccgtcgatggcctcaaggttctgcatatggataggaacgactattacggaggagaatccacttcgctcaatcttattcagctttggaagagattcaggggagatgacaagcctcctccacatttgggcgctagcagggactacaacatcgatatgaaccccaagtttattatggctaatggcaatttggtgcgggttctcatacataccgatgttacaaagtatctctatttcaaagctgtggatgggagctatgtgtttaataaaggaaaggttcataaggtgcctgcaaacgacatggaggccttgaagtccccacttatggggctatttgaaaaacgccgggcacgcaagtttttcatttatgtgcaaaactacaacgagagcgatcccaagacccacgaggggatggacttgacaagagtgactactaaagagttgatagcaaaatacggccttgatgacaacactatagacttcattggtcatgctttggcgcttcatagcgatgatcgctacttggctgagccagcactggacaccgtgaagagaatgaagttatatgcagagtctcttgcacgctttcaaggagggtcaccttacatatatcctttgtatggtttaggagagcttccccaggcatttgcacggcttagtgctgtttatggtggaacatatatgttgaataagcctgagtgcaaggtagaatttgatgaggaaggaaaggttgttggtgttacatctgaaggggaaactgcaaagtgtaaaaaagttgtttgtgatccatcatatttgcctggcaaggtgaggaaggttggtagggttgcaagggcgatagccatcatgagccacccaatccccagcactgatgattcccattcagtgcaaattattttaccacagaaacagttgggtcggaagtcagacatgtacctattttgttgttcgtatactcacaatgttgctccaaagggaaaatttattgcatttgtatcaactgaggcagagacagatcagccggcaattggactgaaacctggaattgaccttctaggacctgttgatgagatattttttgatatctatgacagatatgaaccagtcaacgaacccactttggacaactgctttatatcaacaagttatgatgctactactcactttgagtcgactgtggatgacgttctcaacatgtatacattgataactggaaaggttattgacctcagtgtggatcttagtgctgctagtgctgcagaagag

SEQ ID NO: 327 - protein, 444 aa, Glycine max
MDEEYDVIVLGTGLKECILSGLLSVDGLKVLHMDRNDYYGGESTSLNLIQLWKRFRGDDKPPPHLGASRDYNIDMNPKFIMANGNLVRVLIHTDVTKYLYFKAVDGSYVFNKGKVHKVPANDMEALKSPLMGLFEKRRARKFFIYVQNYNESDPKTHEGMDLTRVTTKELIAKYGLDDNTIDFIGHALALHSDDRYLAEPALDTVKRMKLYAESLARFQGGSPYIYPLYGLGELPQAFARLSAVYGGTYMLNKPECKVEFDEEGKVVGVTSEGETAKCKKVVCDPSYLPGKVRKVGRVARAIAIMSHPIPSTDDSHSVQIILPQKQLGRKSDMYLFCCSYTHNVAPKGKFIAFVSTEAETDQPAIGLKPGIDLLGPVDEIFFDIYDRYEPVNEPTLDNCFISTSYDATTHFESTVDDVLNMYTLITGKVIDLSVDLSAASAAEE

SEQ ID NO: 328 - protein, 10 aa, Glycine max
AVDGSYVFNK

SEQ ID NO: 329 - protein, 14 aa, Glycine max
FFIYVQNYNESDPK

SEQ ID NO: 330 - protein, 8 aa, Glycine max
VEFDEEGK

SEQ ID NO: 331 - protein, 16 aa, Glycine max
VIDLSVDLSAASAAEE

SEQ ID NO: 332 - protein, 12 aa, Glycine max
VVGVTSEGETAK

SEQ ID NO: 333 - DNA, 1512 bp, Glycine max
atggcgatgagaaccaaactttctttagctatctttttcttttttcttttagccttattttcaaacctagcctttggcaaatgtaaagaaaccgaggtagaagaagaagaccctgagctcgtaacatgcaaacaccaatgccaacagccacagcaatacactgagggtgacaagcgggtatgcttgcaaagatgtgacaggtatcatcgtatgaagcaagagcgagagaaacaaatccaagaggaaactcgtgagaagaaagaggaggaaagccgtgaaagggaagaagaacaacaagagcagcatgaggaacaagatgaaaatccctacatttttgaggaagataaggattttgagaccagagtcgaaactgaaggtggcagaattcgggttctcaagaagttcactgaaaaatccaagcttcttcagggcattgagaacttccgtttggccattttggaagctagagcacacacgttcgtgtctcctcgccactttgattccgaggttgtttttttcaacatcaaggggcgagccgtacttgggttggtgagtgaaagtgaaacagaaaaaatcacccttgaacctggggacatgatacacataccagctggcaccccactgtacatcgttaacagagatgagaatgataagctcttccttgccatgctccatatacctgtctctgtctctactcctggaaaatttgaggaatttttcgggcctggaggacgagacccagaatcggtcctctcagcattcagctggaatgtgctgcaagctgcgctccaaaccccaaaaggaaagttagaaaagctttttgatcaacagaacgagggaagtattttcgcaataagcagagaacaggtgcgtgcgttggcccctaccaagaaaagctcttggtggccattcggtggcgaatccaagcctcaattcaatattttcagcaagcgtcccactatctccaacggatatggtcgtttaactgaagttggtcctgacgatgatgaaaagagttggcttcaaagactcaatctcatgcttacctttaccaacatcacccagagatctatgagtactattcactacaactcacatgcaacgaagatagcactggtgatcgatggcagagggcatcttcaaatatcatgtccacacatgtcatcaaggtcgtcacactcgaagcatgataagagtagcccttcataccatagaatcagttccgatttgaagcctggaatggtgtttgttgtccctcccggtcatcccttcgtcaccatagcttccaataaagagaatctcctcatgatttgcttcgaggttaacgctcgagacaacaagaagtttacatttgcagggaaggacaacattgtgagttctctggacaacgttgctaaggagcttgcctttaactatccttctgagatggtgaacggagtattcgaccgaaaggagagtttctttttcccttttgagttgccgagagaggagcgtggtcgtcgcgctgatgcg

SEQ ID NO: 334 - protein, 504 aa, Glycine max
MAMRTKLSLAIFFFFLLALFSNLAFGKCKETEVEEEDPELVTCKHQCQQPQQYTEGDKRVCLQRCDRYHRMKQEREKQIQEETREKKEEESREREEEQQEQHEEQDENPYIFEEDKDFETRVETEGGRIRVLKKFTEKSKLLQGIENFRLAILEARAHTFVSPRHFDSEVVFFNIKGRAVLGLVSESETEKITLEPGDMIHIPAGTPLYIVNRDENDKLFLAMLHIPVSVSTPGKFEEFFGPGGRDPESVLSAFSWNVLQAALQTPKGKLEKLFDQQNEGSIFAISREQVRALAPTKKSSWWPFGGESKPQFNIFSKRPTISNGYGRLTEVGPDDDEKSWLQRLNLMLTFTNITQRSMSTIHYNSHATKIALVIDGRGHLQISCPHMSSRSSHSKHDKSSPSYHRISSDLKPGMVFVVPPGHPFVTIASNKENLLMICFEVNARDNKKFTFAGKDNIVSSLDNVAKELAFNYPSEMVNGVFDRKESFFFPFELPREERGRRADA

SEQ ID NO: 335 - protein, 17 aa, Glycine max
DFETRVETEGGRIRVLK

SEQ ID NO: 336 - protein, 12 aa, Glycine max
DNIVSSLDNVAK

SEQ ID NO: 337 - protein, 15 aa, Glycine max
GRAVLGLVSESETEK

SEQ ID NO: 338 - protein, 25 aa, Glycine max
LFDQQNEGSIFAISREQVRALAPTK

SEQ ID NO: 339 - protein, 21 aa, Glycine max
RPTISNGYGRLTEVGPDDDEK

SEQ ID NO: 340 - DNA, 1467 bp, Glycine max
atggcgaccagagccaagctttctttagctatcttccttttctttcttttagccttgatttcaaacctagccttgggcaaacttaaagaaaccgaggtcgaagaagatcccgagctcgtaacatgcaaacaccagtgccaacagcaacggcaatacactgagagtgacaagcgaacatgcttgcaacaatgtgacagtatgaagcaagagcgagagaaacaagtcgaagaggaaactcgcgagaaggaagaagaacatcaagagcagcatgaggaggagcaagaccaaaatccctacgtttttgaagaagataaggatttttcgaccagagtcgaaacagaaggtggcagcattcgggttctcaagaagttcactgagaaatccaagcttcttcaaggcaatgagaatttccgtttggccatcttagaagctagagcacacacgttcgtgtccccacgccactttgattccgaggttgtcttgttcaacattaaggggagagccgtacttgggttggtgagggaaagtgaaacagaaaaaatcaccctagaacctggagacatgatacacataccagcaggcacaccactgtacatcgttaacagagatgagaatgagaagctcctccttgccatgctccatatacctgtctctactcctggaaaatttgaggaatttttcgggcctggaggacgagacccagaatcggtcctctcagcattcagctggaatgtgctgcaagctgcgctccaaaccccaaaaggaaagttagaaaggctttttaatcaacagaacgagggaagtattttcaaaataagcagagaacgggtgcgtgcgttggcccccaccaagaaaagctcttggtggccattcggcggcgaatccaaggctcaattcaatattttcagcaagcgtcccactttctccaacggatatggccgtttaactgaagttggtcctgatgatgaaaagagttggcttcaaagactcaacctcatgcttacctttaccaacatcacccagagatctatgagtactattcactacaactcacatgcaacgaagatagcactggtgatggatggtagagggcatcttcaaatatcatgtccacacatgtcatcaaggtcagactcaaagcatgataagagtagcccctcataccatagaatcagtgcggacttgaagcctggaatggtgtttgttgtccctcctggtcatcccttcgtcactatagcttccaataaagagaatctcctcataatttgcttcgaggttaacgttcgagacaacaagaagtttacgtttgcagggaaggacaacattgtgagctctctggacaacgtagctaaggagctggcctttaactatccttctgagatggtgaacggagtcttcgaaagaaaggagagtctctttttccccttcgagttgccgagcgaggagcgtggtcgtcgcgctgttgcg

SEQ ID NO: 341 - protein, 489 aa, Glycine max
MATRAKLSLAIFLFFLLALISNLALGKLKETEVEEDPELVTCKHQCQQQRQYTESDKRTCLQQCDSMKQEREKQVEEETREKEEEHQEQHEEEQDQNPYVFEEDKDFSTRVETEGGSIRVLKKFTEKSKLLQGNENFRLAILEARAHTFVSPRHFDSEVVLFNIKGRAVLGLVRESETEKITLEPGDMIHIPAGTPLYIVNRDENEKLLLAMLHIPVSTPGKFEEFFGPGGRDPESVLSAFSWNVLQAALQTPKGKLERLFNQQNEGSIFKISRERVRALAPTKKSSWWPFGGESKAQFNIFSKRPTFSNGYGRLTEVGPDDEKSWLQRLNLMLTFTNITQRSMSTIHYNSHATKIALVMDGRGHLQISCPHMSSRSDSKHDKSSPSYHRISADLKPGMVFVVPPGHPFVTIASNKENLLIICFEVNVRDNKKFTFAGKDNIVSSLDNVAKELAFNYPSEMVNGVFERKESLFFPFELPSEERGRRAVA

SEQ ID NO: 342 - protein, 8 aa, Glycine max
AQFNIFSK

SEQ ID NO: 343 - protein, 17 aa, Glycine max
DFSTRVETEGGSIRVLK

SEQ ID NO: 344 - protein, 12 aa, Glycine max
DNIVSSLDNVAK

SEQ ID NO: 345 - protein, 15 aa, Glycine max
GRAVLGLVRESETEK

SEQ ID NO: 346 - protein, 20 aa, Glycine max
RPTFSNGYGRLTEVGPDDEK

SEQ ID NO: 347 - DNA, 1266 bp, Glycine max
atggtgagaggattgctcaacaagctcgtctctcgctccctctcggtcgccggaaaatggcagcacaatcaactccgccgcctcaacatccacgagtaccagggtgctgaattgatgagcaaacacggagtcaacgttccgagaggcgtggctgtttcctctgttgaagaggccagaaaggtcatcaaggaccttttccctaatgaaaatgagttggtggttaagagtcaaattttagccggcggacgaggtttgggaactttcaaaagcggccttaagggaggagtgcacattgttaagactgaccaggttgaagacatagctgggaagatgcttggacagatactagttaccaaacagactggtcctcagggaaaaatagttagcaaggtttacttgtgtgaaaagctgtcacttgtaaatgagatgtactttgctataacactggatcgtacgagtgctggtccaattataattgcttgtagtaagggaggaaccagcattgaagaccttgcagagaaatttccggacatgattataaaggtacctgttgatgtttttgaaggtattactgatgaaggtgctgcaaaggttgttgatggtttggctctcaaagtggctgatagaaataagtcgattgaacaagtgaagaatttgtataaactttttgttgattgtgactgcactcttttggaaatcaatcccatagcggagacagctgataaccaattggtggctgctgatgctaagttgaattttgatgataatgctgcatatcgccagaaagagatattttctctccgtgatacaacacaagaggaccctcgagaggtgactgctgcaaaggcagatttaaattatattgggttagatggagaaattggctgcatggtgaatggagcagggttagcaatggccacaatggatataattaaattgcatgggggtactcctgccaattttctggatgtaggtggcaatgcctctgaaaaccaggttgttgaggcatttaaaatattgactgctgatgacaaagtgaaggcaattttggttaacatttttggtggtataatgaagtgtgatgttatagcaagtggaatagtgaatgctgcaaaagaggttgcactgaaagtaccagttgtagttcgtctggaaggcaccaatgttgatcaaggaaaaagaatattgaaggaaagtggtatggcattaataacggctgaagatttagatgatgcagctcagaaagcagtgaaagctgcttacaaa

SEQ ID NO: 348 - protein, 422 aa, Glycine max
MVRGLLNKLVSRSLSVAGKWQHNQLRRLNIHEYQGAELMSKHGVNVPRGVAVSSVEEARKVIKDLFPNENELVVKSQILAGGRGLGTFKSGLKGGVHIVKTDQVEDIAGKMLGQILVTKQTGPQGKIVSKVYLCEKLSLVNEMYFAITLDRTSAGPIIIACSKGGTSIEDLAEKFPDMIIKVPVDVFEGITDEGAAKVVDGLALKVADRNKSIEQVKNLYKLFVDCDCTLLEINPIAETADNQLVAADAKLNFDDNAAYRQKEIFSLRDTTQEDPREVTAAKADLNYIGLDGEIGCMVNGAGLAMATMDIIKLHGGTPANFLDVGGNASENQVVEAFKILTADDKVKAILVNIFGGIMKCDVIASGIVNAAKEVALKVPVVVRLEGTNVDQGKRILKESGMALITAEDLDDAAQKAVKAAYK

SEQ ID NO: 349 - protein, 12 aa, Glycine max
DLFPNENELVVK

SEQ ID NO: 350 - protein, 20 aa, Glycine max
EIFSLRDTTQEDPREVTAAK

SEQ ID NO: 351 - protein, 26 aa, Glycine max
LHGGTPANFLDVGGNASENQVVEAFK

SEQ ID NO: 352 - protein, 12 aa, Glycine max
LNFDDNAAYRQK

SEQ ID NO: 353 - protein, 14 aa, Glycine max
SQILAGGRGLGTFK

SEQ ID NO: 354 - protein, 10 aa, Glycine max
TDQVEDIAGK

SEQ ID NO: 355 - protein, 16 aa, Glycine max
VPVVVRLEGTNVDQGK

SEQ ID NO: 356 - protein, 8 aa, Glycine max
VVDGLALK

SEQ ID NO: 357 - DNA, 1266 bp, Glycine max
atggtgaggggattgctcaacaagctcgtctctcgctccctctccgtcgccggaaaatggcagcacaaccaactccgccgcctcaacatccacgagtaccagggcgctgaattgatgagcaaacacggagttaatgttccgagaggcgtggctgtttcctctgttgaagaggtcagaaaggccatcaaggaccttttccctaatgaaaatgagttggtggttaagagtcaaattttagccggtggaagaggtttgggaactttcaaaagcggccttaagggaggagtgcacattgttaagactgaccaggttgaagacatagctgggaagatgcttgggcagatactagttaccaaacagactggtcctcagggaaaaatagttagcaaggtttacttgtgtgaaaagctgtcactagtaaatgagatgtactttgctataacactggatcgtacgagtgctggtccaattataattgcttgtagtaagggaggaaccagcattgaagacctagcagagaaatttccggacatgattataaaggtacctgttgatgtttttgaaggaattactgatgaagatgctgcaaaggttgttgatggtttggctctcaaagtggctgatagaaataagtcgattgaacaagtgaagaatttgtataaactttttgttgattgtgactgcacccttttggaaatcaatcccattgcggagacagctgataaccaattggtggctgctgatgctaagttgaattttgacgataatgctgcatatcgccagaaagagatatttgctctccgtgatacaacacaagaggaccctcgagaggtgactgctgcaaaggcagacttaaattatattgggttagatggagaaataggctgcatggtgaatggagcagggttagcaatggccacaatggatataattaaattgcatgggggtactcctgccaattttttggatgtaggtggcaatgcctctgaaggccaggtggttgaggcatttaaaatattgactgctgatgacaaagtgaaggcaattttggttaacatttttgggggtataatgaagtgtgatgttatagcaagtggaatagtgaatgctgcaaaagaggttgcactgaaagtacccgtagtagttcgtctggaaggcaccaatgttgatcatggaaaaagaattttgaaggaaagtggtatggcgttgataacggctgaagatttagatgatgctgctcagaaagcagtgaaagctgcttacaaa

SEQ ID NO: 358 - protein, 422 aa, Glycine max
MVRGLLNKLVSRSLSVAGKWQHNQLRRLNIHEYQGAELMSKHGVNVPRGVAVSSVEEVRKAIKDLFPNENELVVKSQILAGGRGLGTFKSGLKGGVHIVKTDQVEDIAGKMLGQILVTKQTGPQGKIVSKVYLCEKLSLVNEMYFAITLDRTSAGPIIIACSKGGTSIEDLAEKFPDMIIKVPVDVFEGITDEDAAKVVDGLALKVADRNKSIEQVKNLYKLFVDCDCTLLEINPIAETADNQLVAADAKLNFDDNAAYRQKEIFALRDTTQEDPREVTAAKADLNYIGLDGEIGCMVNGAGLAMATMDIIKLHGGTPANFLDVGGNASEGQVVEAFKILTADDKVKAILVNIFGGIMKCDVIASGIVNAAKEVALKVPVVVRLEGTNVDHGKRILKESGMALITAEDLDDAAQKAVKAAYK

SEQ ID NO: 359 - protein, 12 aa, Glycine max
DLFPNENELVVK

SEQ ID NO: 360 - protein, 20 aa, Glycine max
EIFALRDTTQEDPREVTAAK

SEQ ID NO: 361 - protein, 26 aa, Glycine max
LHGGTPANFLDVGGNASEGQVVEAFK

SEQ ID NO: 362 - protein, 12 aa, Glycine max
LNFDDNAAYRQK

SEQ ID NO: 363 - protein, 14 aa, Glycine max
SQILAGGRGLGTFK

SEQ ID NO: 364 - protein, 10 aa, Glycine max
TDQVEDIAGK

SEQ ID NO: 365 - protein, 8 aa, Glycine max
VVDGLALK

SEQ ID NO: 366 - DNA, 1203 bp, Glycine max
atggcgactaagaggagcgtgggaacgttgaaggagggtgatttgaaggggaagagggtattcgtgagggtcgatctgaacgtgcctttggatgacaaccttaacatcaccgatgacactagagtccgtgctgctgttcccaccatcaagtacttgactggttatggtgctaaagtgatcctttctagccatttgggacgtccaaaaggtgtaacacctaaatacagtttgaagcctcttgtgccaaggctgtctcaacttcttggaattgaggttacgatggccaatgactctattggggaggaagttgaaaagttggttacacaacttccagaaggtggtgttttgcttctagagaatgtgaggttctacaaggaggaagagaagaatgatcctgaatttgcaaagaagttggcttctctagctgatctctatgtgaatgatgcatttggcactgcccacagagctcatgcttctacagaaggagttgccaaatacttgaagccctctgttgcaggattcctaatgcagaaggagcttgattatctagttggggctgtgtcaaaccccaagagaccatttgctgctattgtcggtggatcgaaggtgtcttccaagattggagttattgaatccttgttggagaaagttaatgttctcttgcttggtggaggaatgatctttaccttttacaaggctcagggttattcagttgggtcatctcttgtggaggaagacaagcttagccttgcaactacacttcttgaaaaggccaaggctaaaggggtttctttgttgcttccaactgatgttgtcatagcagacaagtttgctgctgatgctaacagcaagactgtgccggcatcaagcatcccagatgggtggatggggttggatattggtcctgattccatcaagacatttggtgaagcattggatacgactcagaccattatttggaatggaccaatgggtgtttttgagtttgataagtttgccacaggaacagaggctatagccaagaaactggcagagctgagtgggaagggagtgacaaccatcattggaggaggtgactccgttgccgctgtggagaaggttggacttgcagacaagatgagccacatctccactggtggtggtgccagcttagagcttcttgagggaaagcaactccctggtgtccttgctcttgatgatgct

SEQ ID NO: 367 - protein, 401 aa, Glycine max
MATKRSVGTLKEGDLKGKRVFVRVDLNVPLDDNLNITDDTRVRAAVPTIKYLTGYGAKVILSSHLGRPKGVTPKYSLKPLVPRLSQLLGIEVTMANDSIGEEVEKLVTQLPEGGVLLLENVRFYKEEEKNDPEFAKKLASLADLYVNDAFGTAHRAHASTEGVAKYLKPSVAGFLMQKELDYLVGAVSNPKRPFAAIVGGSKVSSKIGVIESLLEKVNVLLLGGGMIFTFYKAQGYSVGSSLVEEDKLSLATTLLEKAKAKGVSLLLPTDVVIADKFAADANSKTVPASSIPDGWMGLDIGPDSIKTFGEALDTTQTIIWNGPMGVFEFDKFATGTEAIAKKLAELSGKGVTTIIGGGDSVAAVEKVGLADKMSHISTGGGASLELLEGKQLPGVLALDDA

SEQ ID NO: 368 - protein, 15 aa, Glycine max
AQGYSVGSSLVEEDK

SEQ ID NO: 369 - protein, 13 aa, Glycine max
ELDYLVGAVSNPK

SEQ ID NO: 370 - protein, 8 aa, Glycine max
FAADANSK

SEQ ID NO: 371 - protein, 10 aa, Glycine max
FATGTEAIAK

SEQ ID NO: 372 - protein, 15 aa, Glycine max
GVSLLLPTDVVIADK

SEQ ID NO: 373 - protein, 17 aa, Glycine max
GVTTIIGGGDSVAAVEK

SEQ ID NO: 374 - protein, 10 aa, Glycine max
IGVIESLLEK

SEQ ID NO: 375 - protein, 28 aa, Glycine max
LASLADLYVNDAFGTAHRAHASTEGVAK

SEQ ID NO: 376 - protein, 10 aa, Glycine max
LSLATTLLEK

SEQ ID NO: 377 - protein, 20 aa, Glycine max
LVTQLPEGGVLLLENVRFYK

SEQ ID NO: 378 - protein, 7 aa, Glycine max
NDPEFAK

SEQ ID NO: 379 - protein, 11 aa, Glycine max
QLPGVLALDDA

SEQ ID NO: 380 - protein, 11 aa, Glycine max
RPFAAIVGGSK

SEQ ID NO: 381 - protein, 11 aa, Glycine max
VILSSHLGRPK

SEQ ID NO: 382 - protein, 8 aa, Glycine max
YLTGYGAK

SEQ ID NO: 383 - DNA, 1455 bp, Glycine max
atggcctcagccgcatcccccaccactttctctctcctccactccgccaccccttcctcctcctccaccgccacctccgcctccccctccccctcgcgcgtgcagctcacctcctccctccgcgcccgcccgctgcgccgcctgggcttcgccgcggcggacccgctgctcgcggcgagtgtagcggcgcgcgtggcggcggtgagaggaggaggaaagggcgcgaggggggtggtgtcgatggcgaagaagagcgtgggggacctgagcgcggcggacctgaaggggaagaaggtcttcgtcagggccgacctcaacgtcccgctcgacgacaaccagaacatcaccgacgacaccagaatccgcgccgccattcccaccatcaaacatctcatccaaaacggcgccaaagtcattctctccagccacttggggcggccgaagggtgtcactcccaaatacagcttggcgcctcttgtaccccggctttctgagctcattggtatccagattgtcaaggccgaggacagtattggtccagaagtagaaaagttggtggcttctcttccagatggaggtgttctccttctagaaaatgtgaggttttacaaggaggaagaaaagaatgaccccgagcatgcaaaaaagcttgcctctctggcagatctgtatgtgaatgatgcatttggtactgctcacagggcacatgcatcaacagagggtgttactaaatacctgaagccatctgttgctggttttcttttgcaaaaggaacttgattaccttgttggggcagtatcaaaccccaaaaggccatttgctgccattgttggtggttccaaagtctcatctaaaattggagtgattgagtcacttttagaaaaagttgacatccttcttcttggtggaggaatgatcttcacattttacaaggcacaaggtctttcagtgggttcatcccttgtagaagaagataagttggatcttgctacatcactacttgcaaaagccaaggaaaagggggtgtctctcttgttaccaagtgatgtggtgattgcagacaaatttgctcctgatgctaatagcaaggtcgtgccagcatctgccatccctgatggctggatgggattggatattggtccagattctgttaaatcattcagtgaagcattggatactacccaaaccatcatatggaatggaccaatgggagtgtttgagtttgacaagtttgctgttggtacagaggctattgcaaagaagctggctgacctcagtggaaagggggtgaccacaattattggaggaggagattctgttgcagctgtggagaaagtaggagttgctagtgtcatgagccacatatctactggtggtggtgccagtttggagttattggaaggcaaagagcttccaggagtccttgctcttgatgaagccgtcccagtcgctgtg

SEQ ID NO: 384 - protein, 485 aa, Glycine max
MASAASPTTFSLLHSATPSSSSTATSASPSPSRVQLTSSLRARPLRRLGFAAADPLLAASVAARVAAVRGGGKGARGVVSMAKKSVGDLSAADLKGKKVFVRADLNVPLDDNQNITDDTRIRAAIPTIKHLIQNGAKVILSSHLGRPKGVTPKYSLAPLVPRLSELIGIQIVKAEDSIGPEVEKLVASLPDGGVLLLENVRFYKEEEKNDPEHAKKLASLADLYVNDAFGTAHRAHASTEGVTKYLKPSVAGFLLQKELDYLVGAVSNPKRPFAAIVGGSKVSSKIGVIESLLEKVDILLLGGGMIFTFYKAQGLSVGSSLVEEDKLDLATSLLAKAKEKGVSLLLPSDVVIADKFAPDANSKVVPASAIPDGWMGLDIGPDSVKSFSEALDTTQTIIWNGPMGVFEFDKFAVGTEAIAKKLADLSGKGVTTIIGGGDSVAAVEKVGVASVMSHISTGGGASLELLEGKELPGVLALDEAVPVAV

SEQ ID NO: 385 - protein, 13 aa, Glycine max
ELDYLVGAVSNPK

SEQ ID NO: 386 - protein, 16 aa, Glycine max
ELPGVLALDEAVPVAV

SEQ ID NO: 387 - protein, 10 aa, Glycine max
FAVGTEAIAK

SEQ ID NO: 388 - protein, 15 aa, Glycine max
GVSLLLPSDVVIADK

SEQ ID NO: 389 - protein, 17 aa, Glycine max
GVTTIIGGGDSVAAVEK

SEQ ID NO: 390 - protein, 10 aa, Glycine max
IGVIESLLEK

SEQ ID NO: 391 - protein, 11 aa, Glycine max
RPFAAIVGGSK

SEQ ID NO: 392 - protein, 11 aa, Glycine max
VILSSHLGRPK

SEQ ID NO: 393 - DNA, 1203 bp, Glycine max
atggcgactaagaggagcgtgggaacgttgaaggagggtgatttgaaagggaagagggtgttcgtgagggtcgatctgaacgtgcctttggatgacaaccttaacatcaccgatgacactagagtccgtgctgctgttcccaccatcaagtacttaactggtcatggagccaaagtgatcctttctagccacttgggacgtcctaaaggtgtaacacctaaatacagtttgaagcctcttgtgccaaggctgtctcaacttctcggaattgaggttacgatggcaaatgactctattggggaggaagttgagaagttggttgcacaacttccagaaggtggtgttttgcttctagagaatgtgaggttctataaggaggaagagaagaatgaccctgagtttgcaaagaagttggcttctcttgctgatctctacgtgaatgatgctttcggcactgcccacagagctcatgcttctacagaaggagtggccaaatacttgaagccctctgttgcaggattccttatgcagaaggaacttgactatctagttggagctgtgtcaaaccccaagagaccatttgctgctatcgttggtgggtcaaaggtgtcttccaagattggagttattgagtccttgttggagaaagttaacgttctcttgcttggtggaggaatgatctttaccttttacaaggctcagggttattcagttggttcatctcttgtggaggaagacaagcttagccttgcaactacacttctcgaaaaggccaaggctaaaggggtttctttgttgcttccaactgatgtggtcatagcagacaagtttgctgctgatgctaacagcaagactgtgccagcatcaagcatcccagacgggtggatgggattagatattggtcccgattccatcaagacatttggtgaagcattggataagacccagaccgtcatttggaatggaccaatgggtgtttttgagtttgataagtttgccacaggaacagaggccatagccaagaaactggcagagctgagtgggaagggagtaacgaccatcattggaggaggtgactctgttgccgctgtggagaaggttggtcttgcagacaagatgagccacatctccactggtggtggtgccagcttagagcttcttgaggggaagcaactccctggtgtccttgcccttgatgatgct

SEQ ID NO: 394 - protein, 401 aa, Glycine max
MATKRSVGTLKEGDLKGKRVFVRVDLNVPLDDNLNITDDTRVRAAVPTIKYLTGHGAKVILSSHLGRPKGVTPKYSLKPLVPRLSQLLGIEVTMANDSIGEEVEKLVAQLPEGGVLLLENVRFYKEEEKNDPEFAKKLASLADLYVNDAFGTAHRAHASTEGVAKYLKPSVAGFLMQKELDYLVGAVSNPKRPFAAIVGGSKVSSKIGVIESLLEKVNVLLLGGGMIFTFYKAQGYSVGSSLVEEDKLSLATTLLEKAKAKGVSLLLPTDVVIADKFAADANSKTVPASSIPDGWMGLDIGPDSIKTFGEALDKTQTVIWNGPMGVFEFDKFATGTEAIAKKLAELSGKGVTTIIGGGDSVAAVEKVGLADKMSHISTGGGASLELLEGKQLPGVLALDDA

SEQ ID NO: 395 - protein, 15 aa, Glycine max
AQGYSVGSSLVEEDK

SEQ ID NO: 396 - protein, 13 aa, Glycine max
ELDYLVGAVSNPK

SEQ ID NO: 397 - protein, 8 aa, Glycine max
FAADANSK

SEQ ID NO: 398 - protein, 10 aa, Glycine max
FATGTEAIAK

SEQ ID NO: 399 - protein, 15 aa, Glycine max
GVSLLLPTDVVIADK

SEQ ID NO: 400 - protein, 17 aa, Glycine max
GVTTIIGGGDSVAAVEK

SEQ ID NO: 401 - protein, 10 aa, Glycine max
IGVIESLLEK

SEQ ID NO: 402 - protein, 28 aa, Glycine max
LASLADLYVNDAFGTAHRAHASTEGVAK

SEQ ID NO: 403 - protein, 10 aa, Glycine max
LSLATTLLEK

SEQ ID NO: 404 - protein, 20 aa, Glycine max
LVAQLPEGGVLLLENVRFYK

SEQ ID NO: 405 - protein, 7 aa, Glycine max
NDPEFAK

SEQ ID NO: 406 - protein, 11 aa, Glycine max
QLPGVLALDDA

SEQ ID NO: 407 - protein, 11 aa, Glycine max
RPFAAIVGGSK

SEQ ID NO: 408 - protein, 8 aa, Glycine max
TFGEALDK

SEQ ID NO: 409 - protein, 11 aa, Glycine max
VILSSHLGRPK

SEQ ID NO: 410 - DNA, 1143 bp, Glycine max
atgtcgtcgagcacagttggtcaagtcatcaaatgcaaagctgcggtttcatgggaggcagggaagccacttgtgattgaagaagtagaggtggcaccaccacaagctggtgaagtgcgtttgaagatcctctacacctctctttgccacactgatgtttacttctgggaagccaagggccaaactccattgtttcctcgtatatttggtcatgaagctggagggattgtggagagcgtaggtgagggtgtgactcatctcaaaccaggggaccatgccctcccagtgtttaccggggagtgtggagaatgccctcattgcaagtcagaggagagcaacatgtgtgatcttctcaggatcaacactgataggggtgtcatgatccatgacagccaaacaagattttctattaagggacaacctatttaccattttgttggtacctccacattcagtgaatacactgttgttcatgccggatgtgttgccaaagtcaaccctgctgccccacttgacaaaatttgtgttctcagttgtggaatttgcacaggtcttggggctactatcaatgttgcaaaaccaaaacctggttcttctgttgccatttttggacttggagctgttggccttgctgctgctgaaggggcaaggatttctggtgcatcaagaattattggggttgatttagtttctagcagatttgaagaagctaagaagtttggggtcaatgaatttgtgaacccaaaagaccatgacaagcctgtacaagaggtgattgctgcaatgacgaatgggggtgtggatcgtgctgttgaatgtactggcagcatccaagccatgatctcggcattcgaatgcgtccacgatggttggggtgttgctgtacttgttggagtgccaaacaaagatgatgcattcaaaactcatccagtgaatttcttgaacgagagaactctaaagggtaccttctacggaaactacaaaccccgcactgatcttccttctgttgtggagaagtacatgaatggggaattggaactggagaaattcatcactcacacagttccattctcagagattaacaaggcttttgattacatgctgaaaggggagtccatcagatgcatcattcgaatgggggag

SEQ ID NO: 411 - protein, 381 aa, Glycine max
MSSSTVGQVIKCKAAVSWEAGKPLVIEEVEVAPPQAGEVRLKILYTSLCHTDVYFWEAKGQTPLFPRIFGHEAGGIVESVGEGVTHLKPGDHALPVFTGECGECPHCKSEESNMCDLLRINTDRGVMIHDSQTRFSIKGQPIYHFVGTSTFSEYTVVHAGCVAKVNPAAPLDKICVLSCGICTGLGATINVAKPKPGSSVAIFGLGAVGLAAAEGARISGASRIIGVDLVSSRFEEAKKFGVNEFVNPKDHDKPVQEVIAAMTNGGVDRAVECTGSIQAMISAFECVHDGWGVAVLVGVPNKDDAFKTHPVNFLNERTLKGTFYGNYKPRTDLPSVVEKYMNGELELEKFITHTVPFSEINKAFDYMLKGESIRCIIRMGE

SEQ ID NO: 412 - protein, 10 aa, Glycine max
FGVNEFVNPK

SEQ ID NO: 413 - protein, 13 aa, Glycine max
FITHTVPFSEINK

SEQ ID NO: 414 - protein, 19 aa, Glycine max
GTFYGNYKPRTDLPSVVEK

SEQ ID NO: 415 - protein, 13 aa, Glycine max
THPVNFLNERTLK

SEQ ID NO: 416 - protein, 9 aa, Glycine max
VNPAAPLDK

SEQ ID NO: 417 - DNA, 1113 bp, Glycine max
atgcgtgcagctgcggtggcatgggaagcagggaagccactgtcaatagaaaccatagaagtggcaccaccccagaaaggtgaagtgcgtttgaggatcctcttcaactccctttgccgtagtgatgtttattggtgggatgctaaggaccagactcctctgtttcctcgtatcttaggccacgaagcttcagggattgtggagagcgtgggcgagggtgtgacacatctgaaaccaggtgaccatgcactcccaatattcactggggagtgtggtgaatgcacttattgtaagtctgaagagagcaacctgtgtgagctactcaggatcaacactgacaggggtgttatgctgagtgatggaaaaacaaggttctccaaaaatggccaacccatttaccacttcgttggaacctccactttcagtgaatacactgttctccatgaaggatgtgtagccaagattaaccctaatgccccacttgacaaagttgctattgtcagctgtggattctgcacaggttttggggctactgtgaatgttgcaaaaccaaagcctaataatactgttgctgtctttggcttaggagctgttggtcttgctgcctgtgaaggggcaagggtttctggtgcatctagaatcatcggggttgatttacttcccaatcgatttgaacaagccaaaaaatttggggtcactgattttgtaaacccgaaagatcacaacaaaccagtccaagaggtcattgctgaaatgactaatggaggagtagatcgtgctattgaatgcactggaagcatccaagcttcaatctcagcatttgaatgcactcatgatggttggggtactgctgtccttgttggtgtgccaaagaaggatgttgaattcaaaactaatcctatgaagttcatggaagggagaactcttaagggtaccttctatggtcactacagaccccgcactgacattcctggtgttgtggagaagtacctcaacaaggagttggaactagacaaatttatcactcactctgtgccattctcaaagatcaacactgcatttgatcttatgctgaaaggggagggcataaggtgcctcatctgcatggaagag

SEQ ID NO: 418 - protein, 371 aa, Glycine max
MRAAAVAWEAGKPLSIETIEVAPPQKGEVRLRILFNSLCRSDVYWWDAKDQTPLFPRILGHEASGIVESVGEGVTHLKPGDHALPIFTGECGECTYCKSEESNLCELLRINTDRGVMLSDGKTRFSKNGQPIYHFVGTSTFSEYTVLHEGCVAKINPNAPLDKVAIVSCGFCTGFGATVNVAKPKPNNTVAVFGLGAVGLAACEGARVSGASRIIGVDLLPNRFEQAKKFGVTDFVNPKDHNKPVQEVIAEMTNGGVDRAIECTGSIQASISAFECTHDGWGTAVLVGVPKKDVEFKTNPMKFMEGRTLKGTFYGHYRPRTDIPGVVEKYLNKELELDKFITHSVPFSKINTAFDLMLKGEGIRCLICMEE

SEQ ID NO: 419 - protein, 19 aa, Glycine max
GTFYGHYRPRTDIPGVVEK

SEQ ID NO: 420 - protein, 9 aa, Glycine max
INPNAPLDK

SEQ ID NO: 421 - DNA, 1140 bp, Glycine max
atgtctagcaccgttggccagaccatcaagtgcaaagctgcgattgcatgggaggctgggaagccgctggtgattgaagaagtggaggttgcgccaccgcaagccggtgaagtccgtttgaagatcctctacacctctctttgccacactgatgtttacttctgggatgcgaagggccagactccattgtttcctcgcatttttggccatgaagcttcggggattgtggagagcgtaggcgagggtgtgactcatctgaaaccaggtgaccatgccctccctgtgttcacaggagagtgtggagattgcgcccattgcaagtcagaggagagcaacatgtgtgagctactcaggatcaacaccgataggggtgtcatgatccatgatggccaatcaaggttctctaagaatggacaacccatacaccatttcttgggaacctctacattcagtgaatacactgttgtccatgctggatgtgttgcaaagatcaaccctgctgctccacttgacaaagtttgtgttctcagttgtggaatttgcacaggttttggtgctactgtaaatgtagcaaaaccaaaacctggttcctctgttgccatatttggacttggagctgttggccttgcggctgctgaaggtgcaagagtttcaggtgcttcaagaatcattggagttgatttagtttctgcccgatttgaagaagctaagaagtttggggttaatgagtttgtgaacccaaaggatcatgataaacctgtgcaacaggtaattgctgaaatgaccaatggaggtgtggatcgggctgttgaatgtactggcagcatccaagccatggtctcagcattcgaatgcgtccacgatggttggggtcttgctgtacttgttggtgtgcctagtaaagatgatgcattcaaaactgctcctattaatttcctgaacgagaggactcttaagggcaccttttatggcaactacaaaccacgcaccgatcttccatctgttgtcgagaagtacatgagtggggagctagaagtggacaaattcatcactcacacagttccattctcagagatcaacaaagcttttgatttaatgctgaagggacagtccattaggtgtatcatccgcatgcaagag

SEQ ID NO: 422 - protein, 380 aa, Glycine max
MSSTVGQTIKCKAAIAWEAGKPLVIEEVEVAPPQAGEVRLKILYTSLCHTDVYFWDAKGQTPLFPRIFGHEASGIVESVGEGVTHLKPGDHALPVFTGECGDCAHCKSEESNMCELLRINTDRGVMIHDGQSRFSKNGQPIHHFLGTSTFSEYTVVHAGCVAKINPAAPLDKVCVLSCGICTGFGATVNVAKPKPGSSVAIFGLGAVGLAAAEGARVSGASRIIGVDLVSARFEEAKKFGVNEFVNPKDHDKPVQQVIAEMTNGGVDRAVECTGSIQAMVSAFECVHDGWGLAVLVGVPSKDDAFKTAPINFLNERTLKGTFYGNYKPRTDLPSVVEKYMSGELEVDKFITHTVPFSEINKAFDLMLKGQSIRCIIRMQE

SEQ ID NO: 423 - protein, 10 aa, Glycine max
FGVNEFVNPK

SEQ ID NO: 424 - protein, 13 aa, Glycine max
FITHTVPFSEINK

SEQ ID NO: 425 - protein, 19 aa, Glycine max
GTFYGNYKPRTDLPSVVEK

SEQ ID NO: 426 - protein, 9 aa, Glycine max
INPAAPLDK

SEQ ID NO: 427 - protein, 13 aa, Glycine max
TAPINFLNERTLK

SEQ ID NO: 428 - DNA, 927 bp, Glycine max
atggcgtcaagacagcaattcaaggaagacagagccgaggcagctgcaaaactcgcagcgaaagacatcggcgacatcaacagaacaaacgagcgcgacgaggggtacgacttgcacgacgaagccaacttcaagcaagcacgagctgaagcagctgcaaagctggcggccaaggatctggaggacgctaacagattaagagacaacactttcaacacatggaaagagcaacatcagcatgatgagaacaaacccggtgtgatagggtccatgtttagagccgccaaggaagccgtggttgggaagcctcaccacgaggaagtttatgcaaaggaaacaaagatgggtgaatattcagattatgcgactcagaaggcgagggaaacgaagcagaaggctggggagtatacagactatgcggctcagaaagcaaaagaaaccaaagactatgctgctgagaaggctaagaatgctaaagataccactgtgcagaaagctggagagtacaaggattataccgctgagaaggctaagaatgctaaagataccactgtgcagaaagctggagaatacaaggattataccgctgagaaggcaattgaagggaaggacagtgcagtggggaagcttggggagctaaaggaatctgctgctgatgctgctaaaagggctatgggtttcttcaccggtggcaacaaagaccaaactagagaggaggaggaggaaacgaggcggagtatgcaggaggtgagggtgcaagataaggagtatggaacgggacgtggtactggagagaagttggtgataaaaatggaagagtcgcggccaggagcggtggcggatgcgctcaaagcagcgaatagggccatggacggcgatatggaggaggaaggcgtgcttcatgtggagcgtcgtagggagaaaatg

SEQ ID NO: 429 - protein, 309 aa, Glycine max
MASRQQFKEDRAEAAAKLAAKDIGDINRTNERDEGYDLHDEANFKQARAEAAAKLAAKDLEDANRLRDNTFNTWKEQHQHDENKPGVIGSMFRAAKEAVVGKPHHEEVYAKETKMGEYSDYATQKARETKQKAGEYTDYAAQKAKETKDYAAEKAKNAKDTTVQKAGEYKDYTAEKAKNAKDTTVQKAGEYKDYTAEKAIEGKDSAVGKLGELKESAADAAKRAMGFFTGGNKDQTREEEEETRRSMQEVRVQDKEYGTGRGTGEKLVIKMEESRPGAVADALKAANRAMDGDMEEEGVLHVERRREKM

SEQ ID NO: 430 - protein, 11 aa, Glycine max
AGEYTDYAAQK

SEQ ID NO: 431 - protein, 24 aa, Glycine max
DIGDINRTNERDEGYDLHDEANFK

SEQ ID NO: 432 - protein, 17 aa, Glycine max
DLEDANRLRDNTFNTWK

SEQ ID NO: 433 - protein, 15 aa, Glycine max
EAVVGKPHHEEVYAK

SEQ ID NO: 434 - DNA, 1104 bp, Glycine max
atgggcaaggtcaagatcggaatcaacggatttggaagaattggccgtttggtagccagagtggctctgcagagagacgatgttgaactcgttgccgttaacgaccctttcatcaccaccgattacatgacatacatgtttaaatacgacagtgttcatggacactggaagcatcacgatgtcaccgttaaggacgagaagacccttctcttcggtgacaagccagtcactatttttggacacaggtttttatttttcactttaatttttcttactgtttatgattgttgtgtcctgcatgtaaacgttgagtgttgttttctctgtgaactcagaaaccctgaagagatcccatgggggtcaactggagctgacatcattgttgagtccaccggagttttcaccgataaggacaaggccgccgcacatttgaagggtggtgcaaagaaggttattatttctgcccccagtaaggatgcccccatgtttgttgttggtgtcaacgagcacgagtacaagccagagcttgatattatttccaatgctagctgcacaaccaactgccttgccccacttgccaaggttatcaatgacaggtttggcattgttgagggtttgatgaccactgttcattccatcaccgctacccagaagactgttgatggaccatcagccaaggactggagaggtggaagagctgcttcatttaacatcattcctagcagcactggagctgccaaggctgttgggaaagtcctccctgctttgaatggaaaattgactggtatggcattccgtgttcccaccgtggatgtctctgttgttgacctcacagtgaggctggagaaagaagcttcctacgatgaaattaaaaatgctatcaaggaggaatcagagggcaagttgaagggaattcttggttacactgaagatgatgtggtctccactgactttatcggcgatagcagatcaagtatttttgatgcaaaggctggaattgcattgaataagaactttgtgaagcttgtttcttggtacgacaacgagtggggatacagctcacgtgtcattgatcttcttgtattcgttgccaagaagtctctt

SEQ ID NO: 435 - protein, 368 aa, Glycine max
MGKVKIGINGFGRIGRLVARVALQRDDVELVAVNDPFITTDYMTYMFKYDSVHGHWKHHDVTVKDEKTLLFGDKPVTIFGHRFLFFTLIFLTVYDCCVLHVNVECCFLCELRNPEEIPWGSTGADIIVESTGVFTDKDKAAAHLKGGAKKVIISAPSKDAPMFVVGVNEHEYKPELDIISNASCTTNCLAPLAKVINDRFGIVEGLMTTVHSITATQKTVDGPSAKDWRGGRAASFNIIPSSTGAAKAVGKVLPALNGKLTGMAFRVPTVDVSVVDLTVRLEKEASYDEIKNAIKEESEGKLKGILGYTEDDVVSTDFIGDSRSSIFDAKAGIALNKNFVKLVSWYDNEWGYSSRVIDLLVFVAKKSL

SEQ ID NO: 436 - protein, 8 aa, Glycine max
EASYDEIK

SEQ ID NO: 437 - protein, 27 aa, Glycine max
GILGYTEDDVVSTDFIGDSRSSIFDAK

SEQ ID NO: 438 - protein, 8 aa, Glycine max
VIISAPSK

SEQ ID NO: 439 - protein, 8 aa, Glycine max
VLPALNGK

SEQ ID NO: 440 - DNA, 1014 bp, Glycine max
atgggcaaggtcaagatcggaatcaacggatttggaagaattggccgtttggttgccagagtcgctctgcaaagagacgatgtggagctcgttgccgttaacgaccctttcattaccaccgattacatgacatacatgtttaaatacgacagtgttcacggacactggaagcatcacgatgtcaccgttaaggacgagaagacccttctcttcggtgacaagccagtcactgtttttggacacaggaaccctgaagagatcccatgggggtcaactggagctgatatcattgttgagtccaccggagttttcaccgataaggacaaggccgccgcacatttgaagggtggtgcgaagaaggttattatttctgcccccagtaaggatgcccccatgtttgttgttggtgttaacgagcacgagtacaagccagagcttgatattatttccaatgctagctgcacaaccaactgccttgctccacttgctaaggttattaatgacaggtttggcattgttgagggtttgatgaccactgttcattccatcactgccacccagaagactgttgatgggccatcagccaaagactggagaggtggaagagctgcttcatttaacatcattcctagcagcactggagctgccaaggctgttggaaaagtccttcctgctttgaacggaaaattgactggtatggcattccgtgttcccaccgtggatgtctctgttgttgacctcacagtgaggctggagaaggaagcctcctacgatgaaattaaaaatgctatcaaggaggaatcagagggcaagttgaagggaattcttggttacactgaagatgatgtggtctccaccgactttgtgggcgatagcagatcaagtatttttgatgcaaaggctggaattgcattgaataagaactttgtgaagcttgtctcttggtatgacaacgagtggggatacagctcacgtgtcattgacctgcttgtattcgttgccaagaagtctttt

SEQ ID NO: 441 - protein, 338 aa, Glycine max
MGKVKIGINGFGRIGRLVARVALQRDDVELVAVNDPFITTDYMTYMFKYDSVHGHWKHHDVTVKDEKTLLFGDKPVTVFGHRNPEEIPWGSTGADIIVESTGVFTDKDKAAAHLKGGAKKVIISAPSKDAPMFVVGVNEHEYKPELDIISNASCTTNCLAPLAKVINDRFGIVEGLMTTVHSITATQKTVDGPSAKDWRGGRAASFNIIPSSTGAAKAVGKVLPALNGKLTGMAFRVPTVDVSVVDLTVRLEKEASYDEIKNAIKEESEGKLKGILGYTEDDVVSTDFVGDSRSSIFDAKAGIALNKNFVKLVSWYDNEWGYSSRVIDLLVFVAKKSF

SEQ ID NO: 442 - protein, 8 aa, Glycine max
EASYDEIK

SEQ ID NO: 443 - protein, 27 aa, Glycine max
GILGYTEDDVVSTDFVGDSRSSIFDAK

SEQ ID NO: 444 - protein, 8 aa, Glycine max
VIISAPSK

SEQ ID NO: 445 - protein, 8 aa, Glycine max
VLPALNGK

SEQ ID NO: 446 - DNA, 1020 bp, Glycine max
atggcatcagataagaagattaggatcggcatcaacggatttggaaggattggccgtttggtggccagggttgcccttcaaaggaatgatgttgaacttgttgctgtcaacgatcctttcatcaccactgattacatgacatacatgttcaagtacgacaccgttcatggccagtggaagcattttgatgtgaaggtgaaggactctaagacccttctctttggtgagaagcccgtcaccgtttttggaatcaggaaccctgaggaaattccatggggtgaggttggtgctgattatgttgttgagtcaactggtgtattcactgacaaggacaaggctgctgctcacttgaagggtggtgccaagaaggttgtcatctctgccccaagcaaagatgcacccatgtttgttgttggtgttaacgagaaggagtacaagccagagcttgacattgtttccaatgctagctgcactaccaattgtcttgctcccctcgccaaggttatcaacgaccgatttggaattgtggagggtcttatgaccactgttcatgccatcacagctactcagaagactgttgatggtccatcaaacaaggactggaggggtggaagagctgcttccttcaatataattcccagcagcactggagctgctaaggctgtaggaaaagttcttccagcactgaatggtaaattgactggcatgtccttccgagtccccactgtagatgtttcagttgttgacctcactgtcaggctagagaagccagcaacctatgagcaaatcaaatctgctatcaaggaggaatcagagggcaaattgaagggtattttgggttacaccgaagatgatgttgtgtctactgattttgttggtgataacaggtctagcatatttgacgccaaggccggaatttctttgaacgacaactttgtaaaacttgtttcctggtatgacaacgaatggggttacagttcccgtgtgattgatttgattgtccacattgcatccgtggct

SEQ ID NO: 447 - protein, 340 aa, Glycine max
MASDKKIRIGINGFGRIGRLVARVALQRNDVELVAVNDPFITTDYMTYMFKYDTVHGQWKHFDVKVKDSKTLLFGEKPVTVFGIRNPEEIPWGEVGADYVVESTGVFTDKDKAAAHLKGGAKKVVISAPSKDAPMFVVGVNEKEYKPELDIVSNASCTTNCLAPLAKVINDRFGIVEGLMTTVHAITATQKTVDGPSNKDWRGGRAASFNIIPSSTGAAKAVGKVLPALNGKLTGMSFRVPTVDVSVVDLTVRLEKPATYEQIKSAIKEESEGKLKGILGYTEDDVVSTDFVGDNRSSIFDAKAGISLNDNFVKLVSWYDNEWGYSSRVIDLIVHIASVA

SEQ ID NO: 448 - protein, 11 aa, Glycine max
AGISLNDNFVK

SEQ ID NO: 449 - protein, 27 aa, Glycine max
GILGYTEDDVVSTDFVGDNRSSIFDAK

SEQ ID NO: 450 - protein, 8 aa, Glycine max
VLPALNGK

SEQ ID NO: 451 - protein, 8 aa, Glycine max
VVISAPSK

SEQ ID NO: 452 - DNA, 1050 bp, Glycine max
atggtgacctcgtcgcaaaagattctggttaccggcggtgccggtttcataggcacccacaccgtggtccagcttctcaaaggaggcttcagtgtttcaataatcgacaatttcgataactccgtcgtggaagcagtggaccgcgtccgccaagtggtgggccctcagctttctcagaacctggaattcacccagggcgatctcaggaatagggatgacttggagaaactcttctccagaacaacttttgatgccgtgatccactttgctggcctgaaagcggttgctgaaagcgtttccaagccccgtcgctattttgattttaatttggtcggcaccatcaacctctaccaagttatggcaaagtataattgcagaaagatggttttctcatcatctgcaaccgtttatggccaacctgaaaagataccgtgtgaggaggatttcaggttacaagctatgaatccctatggacggaccaagcttttcctggaagaaattgcccgagatattcagaaagctgaaccagaatggaagatcatattactgaggtacttcaatccggttggggctcatgaaagtggtaaactcggtgaagatcccaagggcatcccaaataacctcatgccttacattcagcaagtagccgttggaagattgccggaactcaatgtatatgggcatgattatcccacaagggatggctctgcgatccgggactatatccatgtgatggacttagcagatggtcatattgctgccttgcgaaagctcttcacaacagagaacataggttgtactgcttacaacctgggaactggtcgtggaacatccgtgcttgaaatggttacagcatttgaaaaggcgtctggcaagaaaattccagtaaaattatgtccaagaagaccgggagatgctactgaggtttatgcatctacagagagagctgagaaagaacttggatggaaagcaaaatatggtgtggatgagatgtgcagggaccaatggaattgggcaaagaacaatccccagggttacacggggaagcct

SEQ ID NO: 453 - protein, 350 aa, Glycine max
MVTSSQKILVTGGAGFIGTHTVVQLLKGGFSVSIIDNFDNSVVEAVDRVRQVVGPQLSQNLEFTQGDLRNRDDLEKLFSRTTFDAVIHFAGLKAVAESVSKPRRYFDFNLVGTINLYQVMAKYNCRKMVFSSSATVYGQPEKIPCEEDFRLQAMNPYGRTKLFLEEIARDIQKAEPEWKIILLRYFNPVGAHESGKLGEDPKGIPNNLMPYIQQVAVGRLPELNVYGHDYPTRDGSAIRDYIHVMDLADGHIAALRKLFTTENIGCTAYNLGTGRGTSVLEMVTAFEKASGKKIPVKLCPRRPGDATEVYASTERAEKELGWKAKYGVDEMCRDQWNWAKNNPQGYTGKP

SEQ ID NO: 454 - protein, 12 aa, Glycine max
LFLEEIARDIQK

SEQ ID NO: 455 - DNA, 1050 bp, Glycine max
atggtgtcttcctcccaacacattctggtcaccggtggtgccggtttcattggcacccacaccgtcgttcagcttctcaaagctggcttcagcgtttcaataatcgacaatttcgataactccgtcatggaagcagtggaccgcgtccgccaagtggttggccctctgctttctcagaacctccaattcacccagggcgatctccggaatagggatgacttggagaaactcttctccaaaacaacatttgatgccgtgatccactttgctggcttgaaagcggttgctgaaagcgttgcgaagccccgtcgctattttgattttaatttggttggcaccatcaacctctacgaatttatggcaaagtataattgcaaaaagatggttttctcatcatctgcaaccgtttatggccaacctgaaaagataccgtgtgaggaggatttcaagttacaagctatgaatccctatggacggaccaagcttttcctggaagaaattgcccgagatattcagaaagctgaaccagaatggaagatcatattactgagatacttcaatccagttggggctcatgaaagtggcaaactcggtgaagatcccaagggcatcccaaataacctcatgccttacattcagcaagtagctgttggaagattgactgaactcaatgtatacggtcatgattatccaacgagggatggctctgcgatccgggactatatccatgtgatggacttggcagatggccatattgctgccctgcgaaagctcttcacaacggagaacataggttgtactgcttacaacctgggaactggtcgtggaacatctgtgcttgaaatggttgcagcatttgaaaaggcttctggcaagaaaattccagtaaaattatgtccaagaagaccgggagatgcgactgaggtttatgcatctacagagagagctgagaaagaacttggttggaaggcaaactatggtgtggaggagatgtgcagggaccaatggaattgggcaaagaacaatccctggggttacgcggggaagcct

SEQ ID NO: 456 - protein, 350 aa, Glycine max; identical to SEQ ID NO: 453

SEQ ID NO: 457 - protein, 12 aa, Glycine max
LFLEEIARDIQK

SEQ ID NO: 458 - protein, 13 aa, Glycine max
TTFDAVIHFAGLK

SEQ ID NO: 459 - DNA, 1341 bp, Glycine max
atgggtaaggaaaagactcacatcaacattgtcgtcattggacatgtcgactctgggaagtcaactaccactggtcatttgatctacaagcttggaggtattgacaagcgtgtgattgagaggttcgagaaggaggctgctgagatgaacaagaggtcattcaagtatgcctgggtgcttgacaagctcaaggctgagcgcgaaagaggaattaccattgatattgctttgtggaagtttgaaaccaccaagtactactgcacagtcatcgatgcccccggacatcgtgactttatcaagaacatgattactggtacctcccaggctgattgtgctgtccttatcattgactccaccactggtggttttgaagctggtatttctaaggatggacagactcgtgagcatgctcttcttgctttcacccttggtgtgaagcagatgatctgctgctgtaacaagatggatgccactaccccgaagtactctaaggctaggtatgatgaaattgtgaaggaagtctcttcctacttgaagaaggttggttacaacccagacaagattccatttgtgcccatctctggtttcgagggtgacaacatgattgagaggtccaccaaccttgactggtacaagggaccaactctccttgaggctcttgaccaaatcaatgagcccaagaggccctcagacaagccactcaggcttccattgcaggatgtctacaaaattggtggtattggtaccgtgccagtgggacgtgttgagactggtgtcgtgaagcccggtatggtggtgacttttggtcccactgggctgacaactgaggttaagtctgttgagatgcaccatgaggctctcacagaggctcttccaggtgacaatgttggctttaatgtgaagaatgttgcagtcaaggatctcaagcgtggttttgttgcatccaactccaaggatgaccctgccaaggaagctgccaacttcacatctcaagtcattatcatgaaccaccctggccagattggaaatggatacgcaccggtgcttgattgccacacttctcacattgctgtcaagttttctgaaatcttgaccaagattgacaggcgatctggtaaggagcttgagaaggagcccaaatttttgaagaatggtgatgcaggtatggttaagatgattccaaccaagcccatggtggttgaaactttctctgagtatcctccccttggtcgttttgctgtgagggacatgcgtcaaactgtggctgtcggagtcatcaagagtgttgagaagaaagaccccaccggagccaaggtcaccaaggccgctgccaagaagaag

SEQ ID NO: 460 - protein, 447 aa, Glycine max
MGKEKTHINIVVIGHVDSGKSTTTGHLIYKLGGIDKRVIERFEKEAAEMNKRSFKYAWVLDKLKAERERGITIDIALWKFETTKYYCTVIDAPGHRDFIKNMITGTSQADCAVLIIDSTTGGFEAGISKDGQTREHALLAFTLGVKQMICCCNKMDATTPKYSKARYDEIVKEVSSYLKKVGYNPDKIPFVPISGFEGDNMIERSTNLDWYKGPTLLEALDQINEPKRPSDKPLRLPLQDVYKIGGIGTVPVGRVETGVVKPGMVVTFGPTGLTTEVKSVEMHHEALTEALPGDNVGFNVKNVAVKDLKRGFVASNSKDDPAKEAANFTSQVIIMNHPGQIGNGYAPVLDCHTSHIAVKFSEILTKIDRRSGKELEKEPKFLKNGDAGMVKMIPTKPMVVETFSEYPPLGRFAVRDMRQTVAVGVIKSVEKKDPTGAKVTKAAAKKK

SEQ ID NO: 461 - protein, 8 aa, Glycine max
ARYDEIVK

SEQ ID NO: 462 - protein, 17 aa, Glycine max
DGQTREHALLAFTLGVK

SEQ ID NO: 463 - protein, 7 aa, Glycine max
EVSSYLK

SEQ ID NO: 464 - protein, 7 aa, Glycine max
FSEILTK

SEQ ID NO: 465 - protein, 10 aa, Glycine max
STTTGHLIYK

SEQ ID NO: 466 - protein, 15 aa, Glycine max
THINIVVIGHVDSGK

SEQ ID NO: 467 - DNA, 1341 bp, Glycine max
atgggtaaagagaaggttcacattaacattgtggtcattggccatgttgactctgggaagtcaaccaccactggccacttgatttacaagcttggaggtattgacaagcgtgttattgagaggtttgagaaagaagctgctgagatgaacaagaggtcattcaaatacgcctgggtgcttgacaagcttaaggctgagcgtgagagaggaattaccattgatattgcattatggaagtttgagaccaccaaatactactgcactgttattgatgctccaggacatcgtgatttcatcaagaacatgattactggaacttcccaggctgattgtgctgtccttatcattgattccacaactggtggttttgaagctggtatttccaaagatggacagactcgcgagcatgctctacttgccttcacccttggtgtcaagcaaatgatctgttgctgtaacaagatggatgccactaccccaaagtactctaaggccaggtatgaagaaattgtgaaggaagtttcttcctacttgaagaaggtaggttacaacccagacaagattccatttgttcccatctcaggttttgagggtgacaacatgattgagaggtccaccaatcttgattggtacaagggaccaacccttctcgaggctcttgaccagatcaatgagcccaagagaccctcagacaagcctttgaggcttcccttgcaggatgtctacaagattggtggtattggaacagtgccagtgggacgagttgaaactggtgtcttgaagcccggtatggtggtgacttttgctcccactggcctgacaactgaagttaagtctgtggagatgcaccatgaagctctccaggaggcccttccaggtgacaacgtaggatttaatgtgaagaatgttgcagtcaaggatctcaagcgtggttttgttgcctcaaactctaaggatgatcctgccaaggaggctgccaacttcacatcccaagtcattataatgaaccatcctggccaaattggaaatggttatgctcctgtgcttgactgccacacttctcacattgccgtcaagtttgccgaacttgtgaccaagattgacaggcgatctggtaaggagattgagaaggagcccaaattcttgaaaaatggagatgcaggttatgttaagatgattcccaccaagcctatggtggtcgaaactttctccgagtatcctcctcttggtcgttttgccgtgagggacatgcgacaaactgtggctgttggagtcatcaagagtgtggagaagaaggacccaactggagccaaggtcaccaaggctgcacagaagaagaag

SEQ ID NO: 468 - protein, 447 aa, Glycine max
MGKEKVHINIVVIGHVDSGKSTTTGHLIYKLGGIDKRVIERFEKEAAEMNKRSFKYAWVLDKLKAERERGITIDIALWKFETTKYYCTVIDAPGHRDFIKNMITGTSQADCAVLIIDSTTGGFEAGISKDGQTREHALLAFTLGVKQMICCCNKMDATTPKYSKARYEEIVKEVSSYLKKVGYNPDKIPFVPISGFEGDNMIERSTNLDWYKGPTLLEALDQINEPKRPSDKPLRLPLQDVYKIGGIGTVPVGRVETGVLKPGMVVTFAPTGLTTEVKSVEMHHEALQEALPGDNVGFNVKNVAVKDLKRGFVASNSKDDPAKEAANFTSQVIIMNHPGQIGNGYAPVLDCHTSHIAVKFAELVTKIDRRSGKEIEKEPKFLKNGDAGYVKMIPTKPMVVETFSEYPPLGRFAVRDMRQTVAVGVIKSVEKKDPTGAKVTKAAQKKK

SEQ ID NO: 469 - protein, 17 aa, Glycine max
DGQTREHALLAFTLGVK

SEQ ID NO: 470 - protein, 7 aa, Glycine max
EVSSYLK

SEQ ID NO: 471 - protein, 10 aa, Glycine max
STTTGHLIYK

SEQ ID NO: 472 - DNA, 1344 bp, Glycine max
atgggtaaggaaaaggttcacatcagtattgtggtcattggccatgtcgactctgggaaatccactaccactggtcacctgatttacaagcttggaggcattgacaagcgtgttattgagaggtttgagaaggaagctgctgagatgaacaagaggtctttcaagtatgcctgggtgctggacaaacttaaggctgagcgtgaaagaggaatcaccattgatattgctttgtggaagtttgaaacaacaaagtattattgcacagttattgatgcgcctggacatagggatttcattaagaatatgattactgggacatcccaagctgactgtgctgttcttatcattgattcgaccactggtggttttgaagctggtatttccaaggatggacagactcgtgaacatgctctgctttcattcacccttggtgtgaaacagatgatttgctgctgtaacaaaatggatgctactacacccaagtattccaaggccaggtatgatgaaattgtgaaggaagtctcttcctacttgaagaaagtaggatacaaccctgacaagattccttttgttcctatctctggttttgagggagacaacatgattgagaggtccacaaaccttgactggtacaagggtccaactctgcttgatgcacttgaccagattagtgagcccaagaggccctctgacaagcccctcaggcttccccttcaggatgtgtacaagattggaggtattggaactgtgccagtgggacgtgttgagaccggtgtcttgaagcctggaatggtggtgacttttgcaccaactggactgacaactgaagtcaagtctgtggagatgcaccatgaatctcttacagaggcacatcctggtgacaatgtgggattcaatgttaagaatgttgctgttaaggatttgaagcgtggttatgttgcctcaaactcaaaggatgaccctgcaaaggaggctgctaacttcacagcccaagtcatcatcatgaaccaccctggtcagattggaaatggctatgcccctgtcctcgactgccacacttctcacattgctgtcaagtttgctgaactcatgaccaagattgacaggcgatccggcaaagagcttgagaaggagcccaagtttttgaagaacggtgatgctggttttgttaagatgattccaaccaaacccatggttgttgaaactttctccgagtatcctccacttggtaggtttgctgttagggacatgcgtcaaactgttgctgtgggagtcatcaagaacgttgagaagaaggatcctaccggagccaaggtcaccaaggctgcccagaagaagaagtga

SEQ ID NO: 473 - protein, 447 aa, Glycine max
MGKEKVHISIVVIGHVDSGKSTTTGHLIYKLGGIDKRVIERFEKEAAEMNKRSFKYAWVLDKLKAERERGITIDIALWKFETTKYYCTVIDAPGHRDFIKNMITGTSQADCAVLIIDSTTGGFEAGISKDGQTREHALLSFTLGVKQMICCCNKMDATTPKYSKARYDEIVKEVSSYLKKVGYNPDKIPFVPISGFEGDNMIERSTNLDWYKGPTLLDALDQISEPKRPSDKPLRLPLQDVYKIGGIGTVPVGRVETGVLKPGMVVTFAPTGLTTEVKSVEMHHESLTEAHPGDNVGFNVKNVAVKDLKRGYVASNSKDDPAKEAANFTAQVIIMNHPGQIGNGYAPVLDCHTSHIAVKFAELMTKIDRRSGKELEKEPKFLKNGDAGFVKMIPTKPMVVETFSEYPPLGRFAVRDMRQTVAVGVIKNVEKKDPTGAKVTKAAQKKK

SEQ ID NO: 474 - protein, 8 aa, Glycine max
ARYDEIVK

SEQ ID NO: 475 - protein, 17 aa, Glycine max
DGQTREHALLSFTLGVK

SEQ ID NO: 476 - protein, 7 aa, Glycine max
EVSSYLK

SEQ ID NO: 477 - protein, 10 aa, Glycine max
STTTGHLIYK

SEQ ID NO: 478 - DNA, 882 bp, Glycine max
atggcttccggtgaacagaaattccctcctcaacaacaacaaacacagcctgggaaggagcatgctatgactccagtaccccaattcactagccctgactacaagccttcaaataaacttcaagggaagattgcattagtcactgggggtgattctgggattggacgagcggtgtgtaacttgtttgccttagaaggtgctaccgtggccttcacgtatgtgaaggggcatgaggacaaggacgcgagggacacattggaaatgatcaagagagcaaagacttcggatgccaaggatccaatggcaatagcatctgatttgggttacgatgagaactgcaagagggtggttgatgaggtcgtgagtgcttatggttgtattgacattctggtcaacaatgcagctgagcagtacgagtgtggaaccgtggaggacatagacgagcctaggcttgagagggtctttcgtacaaatatcttctcctatttcttcatggcgaggcatgccttgaagcacatgaaggaaggaagcagcattatcaacacgacatcagtgaatgcatacaagggacatgcgaaactattggactacacgtccaccaagggggcaattgtggcctatacaaggggtcttgcccttcagctggtgagtaagggaattcgggttaatggggtggctccagggcccatttggacccctttgataccagcctctttcaaggaggaagaaacggcccaatttggagcgcaggtcccaatgaagagagctggtcaacctattgaggttgctccttcctatgtttttcttgcttccaaccaatgctcctcttacataactggacaagtccttcaccccaatggtggaaccgttgtgaatggttaa

SEQ ID NO: 479 - protein, 293 aa, Glycine max
MASGEQKFPPQQQQTQPGKEHAMTPVPQFTSPDYKPSNKLQGKIALVTGGDSGIGRAVCNLFALEGATVAFTYVKGHEDKDARDTLEMIKRAKTSDAKDPMAIASDLGYDENCKRVVDEVVSAYGCIDILVNNAAEQYECGTVEDIDEPRLERVFRTNIFSYFFMARHALKHMKEGSSIINTTSVNAYKGHAKLLDYTSTKGAIVAYTRGLALQLVSKGIRVNGVAPGPIWTPLIPASFKEEETAQFGAQVPMKRAGQPIEVAPSYVFLASNQCSSYITGQVLHPNGGTVVNG

SEQ ID NO: 480 - protein, 15 aa, Glycine max
EGSSIINTTSVNAYK

SEQ ID NO: 481 - protein, 12 aa, Glycine max
FPPQQQQTQPGK

SEQ ID NO: 482 - protein, 17 aa, Glycine max
GAIVAYTRGLALQLVSK

SEQ ID NO: 483 - protein, 8 aa, Glycine max
LLDYTSTK

SEQ ID NO: 484 - DNA, 882 bp, Glycine max
atggcaagcaataaggagtctaagttcccagcacagagccagaaaactcagccaggaaaagaacatgtaatgaatccactcccacaagccacaaatcctgatcacaaggccgccaataaactccagggaaaggtggcgttggtgacaggaggtgactcaggaattggcagagcggtttgcctgtgtttcgcaaaagagggtgcaaccgtggcctttacatacgtaaagggccatgaggacagggataaagatgatactctgaagatgctgcttgaagctaagacaagtggtgcagacaatccattggcaatagcagcggatattggctttgatgagaactgcaaacaggtcattgaccttgttgtcaaagaatatggccgccttgatgttctggtcaacaatgcagctgagcagcatttgacaaactctgttgaggaaatcacacaacagcagcttgagagagtcttcggaaccaacatcttttctcagttctttttggtcaagcatgctctgaagcacatgaaagaagggagctgcatcataaactctacttcagttaatgcatacaatgggaatccagaagcgttggactacactgctaccaagggagcaattgtggccttcaccagaggtctttctcagcagctagcgagtaggggaattagggtgaatggtgtggcacctggcccagtttggacgccaatacaaccagcttcaaagcctgctgagatgattcagaacttggggtgtgaggtgccaatgaaccgcgtggctcagccttgtgagattgcaccatgttatttgttcttggcaacttgtcaggactcttcctactttactggccaagtcctccatccaaatggtgggatggtcgtcaacgct

SEQ ID NO: 485 - protein, 294 aa, Glycine max
MASNKESKFPAQSQKTQPGKEHVMNPLPQATNPDHKAANKLQGKVALVTGGDSGIGRAVCLCFAKEGATVAFTYVKGHEDRDKDDTLKMLLEAKTSGADNPLAIAADIGFDENCKQVIDLVVKEYGRLDVLVNNAAEQHLTNSVEEITQQQLERVFGTNIFSQFFLVKHALKHMKEGSCIINSTSVNAYNGNPEALDYTATKGAIVAFTRGLSQQLASRGIRVNGVAPGPVWTPIQPASKPAEMIQNLGCEVPMNRVAQPCEIAPCYLFLATCQDSSYFTGQVLHPNGGMVVNA

SEQ ID NO: 486 - protein, 11 aa, Glycine max
EGATVAFTYVK

SEQ ID NO: 487 - protein, 8 aa, Glycine max
QVIDLVVK

SEQ ID NO: 488 - DNA, 879 bp, Glycine max
atggcttcgggtgaaaagaaattcccacctcaacaacaacaaacacagcctgggaaggagcatgctatgaatccagtaccccaattcactagccctgactacaagccttcaaataaacttcaaggaaagatagcattagtgactgggggtgactctgggattggacgagcggtgtgtaacttgtttgccttagaaggtgctaccgtgggcttcacatatgtgaaggggcatgaggacaaggacgcgagggacacgttggaaatgatcaagagggcaaagacttcggatgctaaagatccaatggcggtaccagctgatttgggttacgacgagaattgcaagagagtggttgatgaggtcgtgaatgcttatggttgtattgacattctggtcaacaatgcagctgagcaatacgagtgtggaacagtggaggacattgatgagcctaggcttgagagggtctttcgtacaaatatcttctcctatttcttcatgaccaggcatgccttgaagcacatgaaggaaggaagcagcattatcaacacgacatcggtgaatgcatacaagggaaatgcgaaactattggactacacgtccacgaagggagcaattgtggcctatacaaggggacttgctcttcagttggtgagtaagggaattcgggttaatggggtggctcctgggcctatttggaccccattgataccctcctctttcaaggaggaagaaacggctcaatttggtgcccaggtgccaatgaagagagctggccagcctattgaggttgctccgtcttatgtttttcttgcttgcaaccaatgctcctcttacataactggacaagtccttcaccccaatggtggaaccgttgtcaatggt

SEQ ID NO: 489 - protein, 293 aa, Glycine max
MASGEKKFPPQQQQTQPGKEHAMNPVPQFTSPDYKPSNKLQGKIALVTGGDSGIGRAVCNLFALEGATVGFTYVKGHEDKDARDTLEMIKRAKTSDAKDPMAVPADLGYDENCKRVVDEVVNAYGCIDILVNNAAEQYECGTVEDIDEPRLERVFRTNIFSYFFMTRHALKHMKEGSSIINTTSVNAYKGNAKLLDYTSTKGAIVAYTRGLALQLVSKGIRVNGVAPGPIWTPLIPSSFKEEETAQFGAQVPMKRAGQPIEVAPSYVFLACNQCSSYITGQVLHPNGGTVVNG

SEQ ID NO: 490 - protein, 15 aa, Glycine max
EGSSIINTTSVNAYK

SEQ ID NO: 491 - protein, 12 aa, Glycine max
FPPQQQQTQPGK

SEQ ID NO: 492 - protein, 17 aa, Glycine max
GAIVAYTRGLALQLVSK

SEQ ID NO: 493 - protein, 8 aa, Glycine max
LLDYTSTK

SEQ ID NO: 494 - DNA, 3207 bp, Glycine max
atggcttctgagcaaatgcctcgcagagagaacaacagcaatagggtgatagagagagaggttcacgttgagacacacagaaaagagtccctccctgataagggaagggttgtgatagagagtgagaagaaggagaaagagagagagttggcttctgatagagccaggtctggaaatatagttaaggaggacaaagaggttgaagaaggaagaagaggaaaagaaagtggtggtggtggtggtgttcagcatgagaggaagtttgaaacgaaagttgaagagaagaagggttttggggaaaaggctgaactcgagggaataacaagagtggtggtgggaagagagtgcagcaaagaggagaaacaaggaagaacaagagagaaagtagaggcagagaaagcaagatcaatggagaaaactagagatgaagctaaaggaagagaacaagctgaaaccaaaggtcaaaccaagaagggtggtggtgaggaacagggaagaagaagagaagaaataggagaagaaaataaacaatccagcctcgaagagatttctaaatgcagagctgaagctgaagagaaagttaaggagagaaaggagagatcaaaacaagcagcaagtaatgaagctgccaaagagagaaacaagcaggcaaataaggaggcaacaaaggcaaaagatgtcacaagagagaagggtcaacaaggcaatcttaaaacaggaaatgagacacaagacattggccaaaagggttatggtggagcaaaggataccattggtagagtggacaacattactacaccacttgctaaaaaggctcaagttgctggtagcaccactgttcagtatgctggagagaaatcagcacaagccaaagatgctacggtaggatcaatggagaaaactacaaaggatgctaaaggaagagaaaaagcaggaaccaaaggtcaaacaaagaagggtggtggtgaggaacaaggaaaaagaagagaagaaacaggagaagaaaaacaatccagcctggaggagatttctaagcacagagctgaagctcaacaaaaagcaatgagttcaattgaaggtgctaaggagagatacgagagagcaaaacaagaagcaagtaaagcttccaaagagagaaacattcaagcaaataagagggctgaagaagaaagaagaaaagcagaaagtggtaggggtgttcatgtggataagtttgaagagaagaaggattcagtgctgaaagcagaactcgagagaagaacaagagaggtagagggaagagagtggaacaaagaggagaaacaaagaagttgtccaagagggaaagtagaggcagagaaagcaagaccaatggaagaaacaaaactggaagctaaaggaagagaaaaagctgaaaccaaagagggtggtggtgaggaaaaaggaatgagaagagaagaaataggagaagaaaataaacaatccagcctggaagagatttttaagtacagagctgaagctcaacagaaagttaaggagagaaacgagagagcaaaacaagcagcagaagctgccaaagagagaaacaagcaggcaaataaagggaatgaagaaggcagaagagaaagagaaagtggtgggggtgttcatcatgaggctaagtttgaaactaaaggtgaaaaaaagaaggatttagtgggaagagagcggaacaaagaggagaaacaaagaagcagtccaagaggaaaagtagaggcagagaaagcaagaccaatggaagaaacaaaggtggaagctaaaggaagagaaaaagatgtaaccaaagagggtggtgttgaggaacaaggaagaggaagaaaagaaaatgaacaatctagcttgaaagacatttccaagtacagagctgaagctcaacaaaattcattcaatgctactgaagctgctaaggaaagatacgagagggcaaaccaagcgacaagtgaagctgccaaagagagaaacaagcaggcaaataaggaggcaacaaaggcaaaagatgtcacaagagaaatggatcaacaaggcaatcttaaaacagaaaatgagacacaggacaatgaccagaagggttatggtggagcaaagtacaccattggtagtgtggaccacattactacaccatttattgtagaggccaatcttaaatcagaaaatcagatacaagacaatggccaaaagggttatggtggagcaaaggacacaattggtagtgtagaccacattactacaccacttgctgaaaaggccaaagctgctggtagcaccactgctcagtatgttggggagaaagcagcacaagccaaagatgctactgtgcaaactggcaagagtgctgcaaaagttgcctcagatttgagggacaaggctttggccacagggtggagtgctgcacattattctactgagataactgtggagggaaccaaggctgcaacaaatgttgttaagggagttgctgagtatgcaggacagaaggcttctgagcttgcagctatgtcagtggatactgcgaaaggtttagctgctgctgcagctggggagaatgccaaggagtacactgcaaggaagaaggtggaagctgagatggatttggaggccaaaagggaagctcaaaatcaggaatcgaaggagtggccatcagcaaaatccaccactgagagcattcaaagaggacaaggacaacaagaacagcatgagcaaggagaaaaatgggaacatggtgcacaaaggactaataagccacatgaaagcaacattgtggaaacctttgaggaaaacctaggtgggattggggaaaaaagggaacaaaaaccacttggaagcatcattggagagagctttcaaggagttcaagaaaaagggagtgaagtgatggcaagcattggtgaaaaactgggaagtgctgcacatacattagtgaagaagccattggataaggccactgagggagggagagaggtgttgggagctgtaggtgaaactgtggttgagattggtgaaaacatggtgaaaaaaccagcacagaaagtgcagcagcatcaaggtgaaggtggaggaggggtgctgaatgccattggtgaaaccatagcagagatagcagagacaactaaggtgattgttgctggagagggagaaaaggagataatagtaaaaacacatgaatttgaatatggagacttgaaacttgat

SEQ ID NO: 495 - protein, 1069 aa, Glycine max
MASEQMPRRENNSNRVIEREVHVETHRKESLPDKGRVVIESEKKEKERELASDRARSGNIVKEDKEVEEGRRGKESGGGGGVQHERKFETKVEEKKGFGEKAELEGITRVVVGRECSKEEKQGRTREKVEAEKARSMEKTRDEAKGREQAETKGQTKKGGGEEQGRRREEIGEENKQSSLEEISKCRAEAEEKVKERKERSKQAASNEAAKERNKQANKEATKAKDVTREKGQQGNLKTGNETQDIGQKGYGGAKDTIGRVDNITTPLAKKAQVAGSTTVQYAGEKSAQAKDATVGSMEKTTKDAKGREKAGTKGQTKKGGGEEQGKRREETGEEKQSSLEEISKHRAEAQQKAMSSIEGAKERYERAKQEASKASKERNIQANKRAEEERRKAESGRGVHVDKFEEKKDSVLKAELERRTREVEGREWNKEEKQRSCPRGKVEAEKARPMEETKLEAKGREKAETKEGGGEEKGMRREEIGEENKQSSLEEIFKYRAEAQQKVKERNERAKQAAEAAKERNKQANKGNEEGRRERESGGGVHHEAKFETKGEKKKDLVGRERNKEEKQRSSPRGKVEAEKARPMEETKVEAKGREKDVTKEGGVEEQGRGRKENEQSSLKDISKYRAEAQQNSFNATEAAKERYERANQATSEAAKERNKQANKEATKAKDVTREMDQQGNLKTENETQDNDQKGYGGAKYTIGSVDHITTPFIVEANLKSENQIQDNGQKGYGGAKDTIGSVDHITTPLAEKAKAAGSTTAQYVGEKAAQAKDATVQTGKSAAKVASDLRDKALATGWSAAHYSTEITVEGTKAATNVVKGVAEYAGQKASELAAMSVDTAKGLAAAAAGENAKEYTARKKVEAEMDLEAKREAQNQESKEWPSAKSTTESIQRGQGQQEQHEQGEKWEHGAQRTNKPHESNIVETFEENLGGIGEKREQKPLGSIIGESFQGVQEKGSEVMASIGEKLGSAAHTLVKKPLDKATEGGREVLGAVGETVVEIGENMVKKPAQKVQQHQGEGGGGVLNAIGETIAEIAETTKVIVAGEGEKEIIVKTHEFEYGDLKLD

SEQ ID NO: 496 - protein, 13 aa, Glycine max
AAGSTTAQYVGEK

SEQ ID NO: 497 - protein, 21 aa, Glycine max
ALATGWSAAHYSTEITVEGTK

SEQ ID NO: 498 - protein, 15 aa, Glycine max
AQVAGSTTVQYAGEK

SEQ ID NO: 499 - protein, 15 aa, Glycine max
DTIGRVDNITTPLAK

SEQ ID NO: 500 - protein, 16 aa, Glycine max
DTIGSVDHITTPLAEK

SEQ ID NO: 501 - protein, 16 aa, Glycine max
ERELASDRARSGNIVK

SEQ ID NO: 502 - protein, 15 aa, Glycine max
ERYERANQATSEAAK

SEQ ID NO: 503 - protein, 18 aa, Glycine max
GGGEEQGRRREEIGEENK

SEQ ID NO: 504 - protein, 12 aa, Glycine max
GLAAAAAGENAK

SEQ ID NO: 505 - protein, 9 aa, Glycine max
GRVVIESEK

SEQ ID NO: 506 - protein, 9 aa, Glycine max
GVAEYAGQK

SEQ ID NO: 507 - protein, 10 aa, Glycine max
LGSAAHTLVK

SEQ ID NO: 508 - protein, 9 aa, Glycine max
QSSLEEIFK

SEQ ID NO: 509 - protein, 9 aa, Glycine max
QSSLEEISK

SEQ ID NO: 510 - protein, 20 aa, Glycine max
REQKPLGSIIGESFQGVQEK

SEQ ID NO: 511 - protein, 11 aa, Glycine max
TGNETQDIGQK

SEQ ID NO: 512 - protein, 9 aa, Glycine max
VIVAGEGEK

SEQ ID NO: 513 - protein, 28 aa, Glycine max
VQQHQGEGGGGVLNAIGETIAEIAETTK

SEQ ID NO: 514 - DNA, 735 bp, Glycine max
atggcactgtgcaaccgcgtcagatcgggaatctctctcttcaccaaatccacgttcctcacttcccagcgatccactctccaacgatccctcgttgcccctttcatttccctcgcctccagaaattacgccaacgtgccggggcaaaaggaaaccaaagttaaggtccctctggctttgtttggaggttcaggaaactatgcctctgctttgtatattgcatctgtgaaagccaatgcagtggaaaaggttgagactgagcttctgcaatttgttgaggcagtaaagaatagtcccatattttcacagtttataagggacttgtctgtggctaaggatgttagagttaaagttatccaggatatttgtggggaagccaagttttcggatgttacaaagaacttccttgttattgttgctgagaatggaaggcttaaaaacatagacaccattgcaaagaggtttgcacagttgtcaatggcatataagggagaagtgcaagcgactgtgaccactgttgttcctcttccccctgaagaggaaaaggcattgaaggagactcttcaggaaataataggttctggagcgaaggttcatcttgaacagaagattgatccaagcatacttggtgggcttgtgcttgaatttagccagaaggtctttgacatgtcaattaagaccagggcacaacagatggagaggatcctccgagagcccgtgtccattgccaacatc

SEQ ID NO: 515 - protein, 245 aa, Glycine max
MALCNRVRSGISLFTKSTFLTSQRSTLQRSLVAPFISLASRNYANVPGQKETKVKVPLALFGGSGNYASALYIASVKANAVEKVETELLQFVEAVKNSPIFSQFIRDLSVAKDVRVKVIQDICGEAKFSDVTKNFLVIVAENGRLKNIDTIAKRFAQLSMAYKGEVQATVTTVVPLPPEEEKALKETLQEIIGSGAKVHLEQKIDPSILGGLVLEFSQKVFDMSIKTRAQQMERILREPVSIANI

SEQ ID NO: 516 - protein, 12 aa, Glycine max
ETLQEIIGSGAK

SEQ ID NO: 517 - DNA, 678 bp, Glycine max
atgaccacacaagtaccaccacacagtgtccaagtccacacaacaacacaccgctacgaagctggcgtcgtcccccccggagcccgtttcgaaccgccgcgttatgaagccggcgtcaaagcgccctccatttaccattccgagagaggtccaacgacttcccaggtcctcgccgtcctcgccggcctcccggtcggtggcatcctgctcctcctggcgggattgaccctggcaggaaccctcaccggactggcagttgccacgccgctcttcgtcctcttcagcccggtgctggttccagccacggtcgccatcggcctggccgtggccgggttcctgacgtcgggggccttcgggctcacggcgctgtcttccttctcctggatcctgaactacatccgggagacccagccagcctcggagaacctcgccgccgccgcgaagcatcacctcgccgaggcggcggagtacgtggggcagaagacgaaggaagtggggcagaagaccaaggaggttgggcaggatattcagagcaaggcacaggatacaagggaggcagctgcaagggatgcaagggaggcagctgcaagggatgcaagggaagctgctgcaagggatgcaaaggtggaggcaagggatgtaaagagaacaacagtgacagcaacaaccgcaaccgca

SEQ ID NO: 518 - protein, 226 aa, Glycine max
MTTQVPPHSVQVHTTTHRYEAGVVPPGARFEPPRYEAGVKAPSIYHSERGPTTSQVLAVLAGLPVGGILLLLAGLTLAGTLTGLAVATPLFVLFSPVLVPATVAIGLAVAGFLTSGAFGLTALSSFSWILNYIRETQPASENLAAAAKHHLAEAAEYVGQKTKEVGQKTKEVGQDIQSKAQDTREAAARDAREAAARDAREAAARDAKVEARDVKRTTVTATTATA

SEQ ID NO: 519 - protein, 9 aa, Glycine max
EVGQDIQSK

SEQ ID NO: 520 - protein, 11 aa, Glycine max
RTTVTATTATA

SEQ ID NO: 521 - DNA, 627 bp, Glycine max
atgacaaggaaacaagcaagttccacgagacgtggcggtctttcaggagtcttgcattccaaatccaaatcttctcctctactctccatatcccttgtcctatttgtagccatccttctcatcctttatgcttgtatcgggtcaggtatattgggaggaagaaaggatgtgattagcatggctgaagatgatttttcatgcacttttgaagttccaagtgcaattcctgttttgaagaatgcatatggtggcagcatgaaaaatgttttgcacgtaggccctgagagttgttcggtggtctccaaatttttaagagaaggggaaactgaagcatggggtgtggagccatatgacttagacgatgctgataggaactgcaaggctcttgtgcagaaaggcattatacgtgttgcagatataaaattccctttaccatacagggtgaagtctttttctcatgttatagtgtcagatgctttggattacctgtctccaaaatatataaacaaaactcttcctgagctagcaagggtatcttctgatggtattattattttcacaggttacccaggtcaaccgagagctaaaatagcaccattatccaaatttggccgtccacataggtgc

SEQ ID NO: 522 - protein, 209 aa, Glycine max
MTRKQASSTRRGGLSGVLHSKSKSSPLLSISLVLFVAILLILYACIGSGILGGRKDVISMAEDDFSCTFEVPSAIPVLKNAYGGSMKNVLHVGPESCSVVSKFLREGETEAWGVEPYDLDDADRNCKALVQKGIIRVADIKFPLPYRVKSFSHVIVSDALDYLSPKYINKTLPELARVSSDGIIIFTGYPGQPRAKIAPLSKFGRPHRC

SEQ ID NO: 523 - protein, 8 aa, Glycine max
NAYGGSMK

SEQ ID NO: 524 - DNA, 723 bp, Glycine max
atggccgcgcgagctctgttgaccagaaaaaccctagccaccgtgctccgcaacgacgcgaagcccataatcggagttggcataacagcagcggctactcattcacgcgggttgcacgtgtacacgctacccgatctggattacgactatggcgcactggagccagccatcagcggcgacatcatgcagctgcaccaccagaagcaccaccagacttacatcaccaactacaacaaggccctcgagcagctccaagacgccatcgccaagaaagattcctccgccgtcgttaagctccagggcgccatcaagttcaacggcggaggtcatgtcaaccattctattttctggaaaaatctagctcctgttcgtgaaggaggtggtgaaccacccaagggttcactgggatgggctattgacacacattttggttcttttgaagcattaatacaaaaagttaacgcagaaggtgctgcactacaggggtctggatgggtgtggcttggtctggacaaagagttgaagaggcttgtagttgaaaccactgccaaccaggacccactggttactaagggaccaaatttggttccattgattggtattgatgtttgggagcatgcgtactacttacagtacaagaatgttagaccagactatctgaagaacatttggaaagttattaattggaaatatgccagtgaagtgtatgagaaagagagctct

SEQ ID NO: 525 - protein, 241 aa, Glycine max
MAARALLTRKTLATVLRNDAKPIIGVGITAAATHSRGLHVYTLPDLDYDYGALEPAISGDIMQLHHQKHHQTYITNYNKALEQLQDAIAKKDSSAVVKLQGAIKFNGGGHVNHSIFWKNLAPVREGGGEPPKGSLGWAIDTHFGSFEALIQKVNAEGAALQGSGWVWLGLDKELKRLVVETTANQDPLVTKGPNLVPLIGIDVWEHAYYLQYKNVRPDYLKNIWKVINWKYASEVYEKESS

SEQ ID NO: 526 - protein, 11 aa, Glycine max
ALEQLQDAIAK

SEQ ID NO: 527 - protein, 11 aa, Glycine max
HHQTYITNYNK

SEQ ID NO: 528 - protein, 14 aa, Glycine max
NLAPVREGGGEPPK

SEQ ID NO: 529 - protein, 8 aa, Glycine max
NVRPDYLK

SEQ ID NO: 530 - protein, 16 aa, Glycine max
RLVVETTANQDPLVTK

SEQ ID NO: 531 - protein, 8 aa, Glycine max
YASEVYEK

SEQ ID NO: 532 - DNA, 720 bp, Glycine max
atggccgcgcgagccctgttgaccagaaaaaccctagccaccgttctccgcaacgacgcgaagcccataatcggagctggcatagctgcagctactcattctcgtgggttgcacgtgtacacgctccccgatctggattacgactatggcgctctggagccagccatcagcggcgaaatcatgcagctgcaccaccagaagcaccaccagacttacatcaccaacttcaacaaggccctcgagcagctccaagacgccgtcgccaagaaagattcctccgccgtcgttaagctccagggcgccatcaagttcaacggcggaggtcacgtcaaccattctattttctggaaaaatctagctcctgttcgtgaaggaggtggtgaaccacccaagggttcactgggatgggccattgacacacattttggctcttttgaagcattagtacaaaaagttaatgcagaaggtgctgcactacaggggtctggatgggtgtggcttggtctggacaaagagttgaagaggcttgtagttgaaaccactgccaaccaggacccactggttactaagggaccaaatttggttccattgcttggtattgatgtttgggagcatgcgtactacttacagtacaagaatgttagaccagactatctgaagaacatttggaaagttattaattggaaatatgccagtgaagtgtatgagaaagagagctct

SEQ ID NO: 533 - protein, 240 aa, Glycine max
MAARALLTRKTLATVLRNDAKPIIGAGIAAATHSRGLHVYTLPDLDYDYGALEPAISGEIMQLHHQKHHQTYITNFNKALEQLQDAVAKKDSSAVVKLQGAIKFNGGGHVNHSIFWKNLAPVREGGGEPPKGSLGWAIDTHFGSFEALVQKVNAEGAALQGSGWVWLGLDKELKRLVVETTANQDPLVTKGPNLVPLLGIDVWEHAYYLQYKNVRPDYLKNIWKVINWKYASEVYEKESS

SEQ ID NO: 534 - protein, 11 aa, Glycine max
ALEQLQDAVAK

SEQ ID NO: 535 - protein, 11 aa, Glycine max
HHQTYITNFNK

SEQ ID NO: 536 - protein, 14 aa, Glycine max
NLAPVREGGGEPPK

SEQ ID NO: 537 - protein, 8 aa, Glycine max
NVRPDYLK

SEQ ID NO: 538 - protein, 16 aa, Glycine max
RLVVETTANQDPLVTK

SEQ ID NO: 539 - protein, 8 aa, Glycine max
YASEVYEK

SEQ ID NO: 540 - DNA, 486 bp, Glycine max
atggctccaattgcagtgggagatgtcattccagacggcattttggcttacttggatgaagaaaacaaaccccaaactgtctctattcactctctcgccgccggcaagaaagtcatcatctttggggttcccggtgccttcactcctacatgcagcttgaagcacgtgcctggcttcattgagagagcagaagagctgaaaggaaagggtgtggacgaaataatctgtatcagcgtgaatgatccctttgtgatgaactcatgggccaaaacgttcccagagaacaagcatgttaagttccttgctgatggtgcagccaaatacaccaatgccctcggtcttgagcttgacctcaccgacaagggtctcggcgtccgctcaaagaggtttgctttgctggtggaagacctcaaggtgaaggttgcaaatgttgaaagtggaggagagttcaccatctccagtgctgaagagatcatcaaggccctc

SEQ ID NO: 541 - protein, 162 aa, Glycine max
MAPIAVGDVIPDGILAYLDEENKPQTVSIHSLAAGKKVIIFGVPGAFTPTCSLKHVPGFIERAEELKGKGVDEIICISVNDPFVMNSWAKTFPENKHVKFLADGAAKYTNALGLELDLTDKGLGVRSKRFALLVEDLKVKVANVESGGEFTISSAEEIIKAL

SEQ ID NO: 542 - protein, 13 aa, Glycine max
HVPGFIERAEELK

SEQ ID NO: 543 - protein, 10 aa, Glycine max
RFALLVEDLK

SEQ ID NO: 544 - protein, 20 aa, Glycine max
VANVESGGEFTISSAEEIIK

SEQ ID NO: 545 - protein, 14 aa, Glycine max
YTNALGLELDLTDK

SEQ ID NO: 546 - DNA, 486 bp, Glycine max
atggctccaattgcagtgggaaacgtgattccagacggcattttggcttacttggatgaagaaaacaaaccccaaactgtctccattcactctctcgccaccggcaagaaagtcatcatctttggggttcccggtgccttcactcctacttgcagcttgaagcacgttcctggcttcattgagagagcagaagagctgaaagggaagggtgtggacgaaataatctgtatcagtgtgaatgatccatttgtgatgaactcatgggccaaaacattcccagagaacaagcatgttaagttccttgctgatggtgcagccaaatacaccaatgcccttggtcttgagcttgacctcactgacaagggtctcggcgtccgctcaaagaggtttgctctgctggtggaagacctcaaggtgaaggttgcgaatgttgaaagtggaggagagttcaccatctccagtgctgaagagatcatcaaggccctt

SEQ ID NO: 547 - protein, 162 aa, Glycine max
MAPIAVGNVIPDGILAYLDEENKPQTVSIHSLATGKKVIIFGVPGAFTPTCSLKHVPGFIERAEELKGKGVDEIICISVNDPFVMNSWAKTFPENKHVKFLADGAAKYTNALGLELDLTDKGLGVRSKRFALLVEDLKVKVANVESGGEFTISSAEEIIKAL

SEQ ID NO: 548 - protein, 13 aa, Glycine max
HVPGFIERAEELK

SEQ ID NO: 549 - protein, 10 aa, Glycine max
RFALLVEDLK

SEQ ID NO: 550 - protein, 20 aa, Glycine max
VANVESGGEFTISSAEEIIK

SEQ ID NO: 551 - protein, 14 aa, Glycine max
YTNALGLELDLTDK

SEQ ID NO: 552 - DNA, 456 bp, Glycine max
atgtcgcagttgctggataaagccaagaacttcgtgtcggagaaggtaaatgatatggccaagccggaggcgagtgtcactgacgtggacttcaagcgcgtgagcaaagataatgtcgagtacttggccaaggtctctgttcgtaacccttattcaacttccatacccatttgtgagatcaactactctttcaaaagcgcatccagggagatagcatcagggaaaattccagacccaggatcgttgaaggcaaaggacacaacaatggtggatgtgccagttaaggttccatacagcatattgatgagcttggcaaaggacattggtgctgactgggacatagactatcaattggatcttggtctggttattgatgttcctgtcattggcatcttcaccattcctctctctcagaaaggagagatcaagctaccaaccctctctaccatgttcgcc

SEQ ID NO: 553 - protein, 152 aa, Glycine max
MSQLLDKAKNFVSEKVNDMAKPEASVTDVDFKRVSKDNVEYLAKVSVRNPYSTSIPICEINYSFKSASREIASGKIPDPGSLKAKDTTMVDVPVKVPYSILMSLAKDIGADWDIDYQLDLGLVIDVPVIGIFTIPLSQKGEIKLPTLSTMFA

SEQ ID NO: 554 - protein, 8 aa, Glycine max
DNVEYLAK

SEQ ID NO: 555 - DNA, 480 bp, Glycine max
atgtcggacgaagagcaccatttcgagtccaaggcagacgccggtgcctccaaaacctaccctcagcaagccggtaccattcgcaagaacggctacatcgtcatcaaaggacgcccctgcaaggttgtggaagtttcgacttccaaaactggaaagcacggtcacgccaagtgccactttgttggaattgatattttcactgccaagaaacttgaggatattgtgccctcttctcacaactgtgatgttcctcatgtgaatcgtactgattaccagctcattgatattgctgaggatggatttttgagtctgcttactgaaaatgggaacaccaaggatgacctcaagcttcccactgatgagagtctgctcactcagataaaggatggatttgctgagggcaaggatcttgttgtgtctgtcatgtctgctatgggtgaggaacagatttgcgccctgaaggatattgggccaaagaac

SEQ ID NO: 556 - protein, 160 aa, Glycine max
MSDEEHHFESKADAGASKTYPQQAGTIRKNGYIVIKGRPCKVVEVSTSKTGKHGHAKCHFVGIDIFTAKKLEDIVPSSHNCDVPHVNRTDYQLIDIAEDGFLSLLTENGNTKDDLKLPTDESLLTQIKDGFAEGKDLVVSVMSAMGEEQICALKDIGPKN

SEQ ID NO: 557 - protein, 12 aa, Glycine max
LPTDESLLTQIK

SEQ ID NO: 558 - protein, 7 aa, Glycine max
NGYIVIK

SEQ ID NO: 559 - DNA, 480 bp, Glycine max
atgtcggacgaagagcatcacttcgattctcaggcggatgcgggagcgtccaagacgtatcctcagcaggctggtaccattcgcaagaatggctacatcgtcatcaaatccaggccttgcaaggttgtagaggtctctacgtcaaagacaggcaaacatggacatgcaaagtgtcactttgctgcaattgatatttttaatgggaaaaagcttgaagatattgttccatcatcccacaactgtgatgttccacatgtgaatcgcactgactatcagcttattgatatctctgaagacggctttgtgagtctgttgactgataatggaaataccaaggatgatctgaagcttcctactgatgaggcattgcttgctcagattaaagatggattttctgaaggaaaagaccttgtggtttctgttatgtctgcaatgggagaagaacagatctgttcactgaaggacatcggtcccaaaaat

SEQ ID NO: 560 - protein, 160 aa, Glycine max
MSDEEHHFDSQADAGASKTYPQQAGTIRKNGYIVIKSRPCKVVEVSTSKTGKHGHAKCHFAAIDIFNGKKLEDIVPSSHNCDVPHVNRTDYQLIDISEDGFVSLLTDNGNTKDDLKLPTDEALLAQIKDGFSEGKDLVVSVMSAMGEEQICSLKDIGPKN

SEQ ID NO: 561 - protein, 7 aa, Glycine max
NGYIVIK

SEQ ID NO: 562 - protein, 11 aa, Glycine max
TYPQQAGTIRK

SEQ ID NO: 563 - protein, 8 aa, Glycine max
VVEVSTSK

SEQ ID NO: 564 - DNA, 501 bp, Glycine max
atggctagccaatcaaacactaaatcagttcacgatttcacagttaaagatgccaggggaaataatgttaatctcgccgattacaaaggaaaggtccttctcattgtcaatgttgcctcacaatgcggcttgactaattcaaactacacagagcttaaccaattgtatgagaaatacaaagggaaaggacttgaaattctggcattcccatgcaatcagtttggggctcaggagccaggaactaatgaagagattgtggagtttgcttgtactcgcttcaaagctgagtttcccattttcgacaaggtggatgtgaatggtgacaatgctgctccactgtacaagtttctgaaatcaagcaaaggtggactctttggggatagtatcaaatggaacttctccaaattccttgttgataaggatgggaatgtcgttgaccgttatgcacccacaacttctcctctcagcattgagaaagacataaagaagctgctagatgca

SEQ ID NO: 565 - protein, 167 aa, Glycine max
MASQSNTKSVHDFTVKDARGNNVNLADYKGKVLLIVNVASQCGLTNSNYTELNQLYEKYKGKGLEILAFPCNQFGAQEPGTNEEIVEFACTRFKAEFPIFDKVDVNGDNAAPLYKFLKSSKGGLFGDSIKWNFSKFLVDKDGNVVDRYAPTTSPLSIEKDIKKLLDA

SEQ ID NO: 566 - protein, 8 aa, Glycine max
AEFPIFDK

SEQ ID NO: 567 - protein, 13 aa, Glycine max
DARGNNVNLADYK

SEQ ID NO: 568 - protein, 19 aa, Glycine max
DGNVVDRYAPTTSPLSIEK

SEQ ID NO: 569 - protein, 9 aa, Glycine max
GGLFGDSIK

SEQ ID NO: 570 - protein, 13 aa, Glycine max
VDVNGDNAAPLYK

SEQ ID NO: 571 - DNA, 357 bp, Glycine max
atggcttccgaagaatcccagaacaagccccccagcgagcagtccactaccgaactcatcacgagcgcgaagctggtggcggaggcggcgcagtcggctctgaagagcgacagcgacaaagtggacaaggccaaggtggctgacgctgccggcgatcttctcgacgcggcggggaagtatggaaaacttgatgacaaacaaggcatagggcaatatgttgacaaggctgctgattatctgcataattaccagggtgataataccactgctccttcacagcctgcagagtctaaaggtgaagaaagtggtggtgggttaggtggtcttgcaaacttggctggaggcttcttcaaaaag

SEQ ID NO: 572 - protein, 119 aa, Glycine max
MASEESQNKPPSEQSTTELITSAKLVAEAAQSALKSDSDKVDKAKVADAAGDLLDAAGKYGKLDDKQGIGQYVDKAADYLHNYQGDNTTAPSQPAESKGEESGGGLGGLANLAGGFFKK

SEQ ID NO: 573 - protein, 23 aa, Glycine max
AADYLHNYQGDNTTAPSQPAESK

SEQ ID NO: 574 - protein, 11 aa, Glycine max
LVAEAAQSALK

SEQ ID NO: 575 - protein, 9 aa, Glycine max
QGIGQYVDK

SEQ ID NO: 576 - protein, 14 aa, Glycine max
VADAAGDLLDAAGK

SEQ ID NO: 577 - DNA, 777 bp, Glycine max
atggcggccgctccctcgcctcgcgaagagaacgtctacatggcgaagctcgccgagcaggccgagcgctacgaagagatggtggagttcatggagaaggtctccgccgccgccgacaacgaggaacttaccgtggaggagaggaacctcctctccgtcgcctacaagaacgtgatcggagcgcgccgcgcctcgtggcgcatcatctcctcgatcgagcagaaggaggagagccgcggcaacgaggatcacgtctccgtcatccgcgactaccgatccaagatcgagtccgagctctccaacatctgcgacggtatcctcaagctcctcgactctcgcctcattccatccgcttcctccggcgattccaaggtcttctacctcaagatgaagggagattaccacagataccttgccgagttcaagaccggcgccgagcgtaaggaggctgccgagagcactctctctgcatacaaagccgcacaggacattgcgaatgccgaactgcctcctactcatccaattaggcttggccttgctcttaacttttctgtattttactacgaaatccttaattctccggatcgtgcctgcaaccttgcaaaacaggcttttgatgaagctattgctgaattggatacactgggagaggagtcatacaaggatagcactttgatcatgcaactccttcgtgataacctcacactttggacctctgacatgcaggacgatggagcagatgaaattaaagaagcagcaccgaaaccggatgaccag

SEQ ID NO: 578 - protein, 259 aa, Glycine max
MAAAPSPREENVYMAKLAEQAERYEEMVEFMEKVSAAADNEELTVEERNLLSVAYKNVIGARRASWRIISSIEQKEESRGNEDHVSVIRDYRSKIESELSNICDGILKLLDSRLIPSASSGDSKVFYLKMKGDYHRYLAEFKTGAERKEAAESTLSAYKAAQDIANAELPPTHPIRLGLALNFSVFYYEILNSPDRACNLAKQAFDEAIAELDTLGEESYKDSTLIMQLLRDNLTLWTSDMQDDGADEIKEAAPKPDDQ

SEQ ID NO: 579 - protein, 11 aa, Glycine max
EAAESTLSAYK

SEQ ID NO: 580 - protein, 16 aa, Glycine max
LLDSRLIPSASSGDSK

SEQ ID NO: 581 - protein, 19 aa, Glycine max
QAFDEAIAELDTLGEESYK

SEQ ID NO: 582 - protein, 23 aa, Glycine max
VSAAADNEELTVEERNLLSVAYK

SEQ ID NO: 583 - DNA, 993 bp, Glycine max
atggcgttgaacaatggcgtccccgccaccggcaccggcctcatcgtcagcttcggtgagatgctcatcgacttcgtccccaccgtctctggcgtgtccctggccgaggcccctggcttcctcaaggcccccggcggcgcccccgctaacgtcgccatcgccgtgtcgcgcctcggcggcaaagccgccttcgtcggcaagctcggcgacgacgagttcggccacatgctcgccggaatcctcaaggaaaacggcgttcgcgccgacggcatcaactttgaccagggcgcacgcaccgccctggccttcgtgaccctacgcgccgacggggagcgtgagttcatgttctacagaaaccccagcgccgacatgctcctcaagcccgaagaactcaatctcgaactcatcagatctgcaaaagttttccattacggatcaatcagtttgatcgtggagccatgcagatcagcacacttgaaggcaatggaagtagccaaggaatctgggtgcttgctctcctatgaccccaaccttcgtctacctttgtggccttcggctgaggaagctcgtaagcaaatactgagcatttgggagaaggctgatttgatcaaggtcagtgatgcggagcttgagttcctcacaggaagtgacaagattgatgatgaatctgctttgtcattgtggcaccccaatttgaagttgctccttgtcactcttggggaacatggttccagatactacaccaagagtttcaaaggatcggtagatgctttccatgtcaatacagttgatacaactggtgccggtgattcctttgttggtgctttattggccaagattgtcgatgatcagtccatacttgaagatgaaccaaggttaagagaagtactaaagtttgcaaatgcatgtggagctattacaactacccaaaagggagcaattccggcccttcccaaagaggaggctgcactgaaactgatcaaaggggggtca

SEQ ID NO: 584 - protein, 331 aa, Glycine max
MALNNGVPATGTGLIVSFGEMLIDFVPTVSGVSLAEAPGFLKAPGGAPANVAIAVSRLGGKAAFVGKLGDDEFGHMLAGILKENGVRADGINFDQGARTALAFVTLRADGEREFMFYRNPSADMLLKPEELNLELIRSAKVFHYGSISLIVEPCRSAHLKAMEVAKESGCLLSYDPNLRLPLWPSAEEARKQILSIWEKADLIKVSDAELEFLTGSDKIDDESALSLWHPNLKLLLVTLGEHGSRYYTKSFKGSVDAFHVNTVDTTGAGDSFVGALLAKIVDDQSILEDEPRLREVLKFANACGAITTTQKGAIPALPKEEAALKLIKGGS

SEQ ID NO: 585 - protein, 19 aa, Glycine max
APGGAPANVAIAVSRLGGK

SEQ ID NO: 586 - protein, 27 aa, Glycine max
GSVDAFHVNTVDTTGAGDSFVGALLAK

SEQ ID NO: 587 - protein, 19 aa, Glycine max
IVDDQSILEDEPRLREVLK

SEQ ID NO: 588 - protein, 14 aa, Glycine max
VSDAELEFLTGSDK

SEQ ID NO: 589 - DNA, 759 bp, Glycine max
atgggcagaaagttcttcgttggtggcaactggaaatgcaatgggaccactgaggaggtgaagaagattgttactactttaaatgaagctaaagtccctggagaagatgttgtagaagttgttgtgagccctccttttgtgttccttccttttgtaaaaagtttgctgcgccctgatttccatgtctcggcccaaaattgttgggttcgcaaaggtggtgcttatactggagaggttagtgctgaaatgcttgttaatttgggaattccttgggttattattggtcactctgaacggaggcagcttttgaatgaatcaaatgagtttgtgggagataaagttgcctatgcacttcaacaaggtctgaaagttatagcatgcattggggaaactcttgaacagcgtgaagctggtacaacaacggctgttgttgctgagcaaacaaaagcaattgcagctaaaatatcaaattgggacaatgtcgttttggcctatgagccagtttgggccattggaacaggaaaggttgcaactcctgctcaggctcaagaggttcatgctgatttaaggaaatgggttcatgacaatgtgagtgctgaagttgctgcatctgtaagaattatctatggaggctctgtaaatggaggaaactgcaaagaattggcagcacagcccgatgttgatggatttttggttggtggtgcatccctcaaggcggaatttgtggacatcataaacgctgccactgtgaagaagaat

SEQ ID NO: 590 - protein, 253 aa, Glycine max
MGRKFFVGGNWKCNGTTEEVKKIVTTLNEAKVPGEDVVEVVVSPPFVFLPFVKSLLRPDFHVSAQNCWVRKGGAYTGEVSAEMLVNLGIPWVIIGHSERRQLLNESNEFVGDKVAYALQQGLKVIACIGETLEQREAGTTTAVVAEQTKAIAAKISNWDNVVLAYEPVWAIGTGKVATPAQAQEVHADLRKWVHDNVSAEVAASVRIIYGGSVNGGNCKELAAQPDVDGFLVGGASLKAEFVDIINAATVKKN

SEQ ID NO: 591 - protein, 13 aa, Glycine max
AEFVDIINAATVK

SEQ ID NO: 592 - protein, 19 aa, Glycine max
ELAAQPDVDGFLVGGASLK

SEQ ID NO: 593 - protein, 8 aa, Glycine max
FFVGGNWK

SEQ ID NO: 594 - protein, 9 aa, Glycine max
IVTTLNEAK

SEQ ID NO: 595 - protein, 16 aa, Glycine max
VATPAQAQEVHADLRK

SEQ ID NO: 596 - protein, 10 aa, Glycine max
VAYALQQGLK

SEQ ID NO: 597 - protein, 22 aa, Glycine max
VPGEDVVEVVVSPPFVFLPFVK

SEQ ID NO: 598 - DNA, 759 bp, Glycine max
atgggcagaaaattcttcgttggtggcaactggaaatgcaatgggaccactgaggaggtaaagaagattgttactactttgaatgaggctaaagtccctggagaagatgtcgtagaagttgttgtgagccctccttttgtgttccttcctgttgtaaaaagtttgctgcgccctgatttccatgtttcggcacaaaactgttgggttcgcaaaggtggtgcttataccggtgaggttagtgctgaaatgcttgttaatttgggaattccttgggttattattggtcactctgaacggaggcagcttttaaatgaatcaaatgagtttgtgggagataaagttgcctatgcacttcaacaaggtctaaaagttattgcatgcattggggagactctcgaacagcgtgaagctggtacaacaacggctgttgtttctgagcaaacaaaagcaattgcagctaaaatatcaaattgggacaatgtcgttttggcctacgagccagtttgggccattggaacaggaaaggttgctactcctgctcaggctcaagaggtccatgctgatttgaggaaatgggttcatgacaatgtgagtgctgaagttgctgcatctgtaagaattatctatggaggttctgtaaatggaggaaactgcaaagaattggccgcacagcccgatgttgatggatttttggttggtggtgcctccctgaagccggagttcgtggacatcataaatgctgccactgtgaagaagaat

SEQ ID NO: 599 - protein, 253 aa, Glycine max
MGRKFFVGGNWKCNGTTEEVKKIVTTLNEAKVPGEDVVEVVVSPPFVFLPVVKSLLRPDFHVSAQNCWVRKGGAYTGEVSAEMLVNLGIPWVIIGHSERRQLLNESNEFVGDKVAYALQQGLKVIACIGETLEQREAGTTTAVVSEQTKAIAAKISNWDNVVLAYEPVWAIGTGKVATPAQAQEVHADLRKWVHDNVSAEVAASVRIIYGGSVNGGNCKELAAQPDVDGFLVGGASLKPEFVDIINAATVKKN

SEQ ID NO: 600 - protein, 32 aa, Glycine max
ELAAQPDVDGFLVGGASLKPEFVDIINAATVK

SEQ ID NO: 601 - protein, 8 aa, Glycine max
FFVGGNWK

SEQ ID NO: 602 - protein, 9 aa, Glycine max
IVTTLNEAK

SEQ ID NO: 603 - protein, 16 aa, Glycine max
VATPAQAQEVHADLRK

SEQ ID NO: 604 - protein, 10 aa, Glycine max
VAYALQQGLK

SEQ ID NO: 605 - DNA, 765 bp, Glycine max
atggcctcattgggtgggttacaaaatgtgagcggcatcaattttcttatcaaagagaaaggatgttgtatgctgcagggtccaaaagtcaatgcaaagttcgagctgaagccgccaccatatccactgaatggtttggagccggtgatgagccagcagacacttgagtttcactgggggaagcaccacaagacttatgtggaaaatctgaaaaaacaagttgttgggacagagcttgatgggaagtcactagaagagattattgtcacatcatacaataagggtgacattcttccagctttcaacaatgcagcacaggtatggaaccatgacttcttctgggagtgcatgaaaccaggtggaggtggaaagccatccggggagcttctagaactgattgaaagagactttggttcatttgtaaaattccttgatgagttcaaggctgctgctgcaacacaatttggttcagggtgggcttggctagcatatagagcaagaaaatttgatggggaaaatgtagcaaatcctccttcacccgatgaggacaacaagctagtggtgctcaagagtcccaatgctgtgaacccccttgtttggggaggttactacccacttcttaccattgatgtttgggagcatgcttactaccttgattttcagaaccggcgtcctgattatatatcagtgttcatggataagcttgtttcctgggatgcagtgagctctagacttgaacaagctaaggctttaattaccagtgca

SEQ ID NO: 606 - protein, 255 aa, Glycine max
MASLGGLQNVSGINFLIKEKGCCMLQGPKVNAKFELKPPPYPLNGLEPVMSQQTLEFHWGKHHKTYVENLKKQVVGTELDGKSLEEIIVTSYNKGDILPAFNNAAQVWNHDFFWECMKPGGGGKPSGELLELIERDFGSFVKFLDEFKAAAATQFGSGWAWLAYRARKFDGENVANPPSPDEDNKLVVLKSPNAVNPLVWGGYYPLLTIDVWEHAYYLDFQNRRPDYISVFMDKLVSWDAVSSRLEQAKALITSA

SEQ ID NO: 607 - protein, 17 aa, Glycine max
FDGENVANPPSPDEDNK

SEQ ID NO: 608 - protein, 15 aa, Glycine max
LVSWDAVSSRLEQAK

SEQ ID NO: 609 - protein, 10 aa, Glycine max
QVVGTELDGK

SEQ ID NO: 610 - protein, 12 aa, Glycine max
SLEEIIVTSYNK

SEQ ID NO: 611 - protein, 7 aa, Glycine max
TYVENLK

SEQ ID NO: 612 - DNA, 732 bp, Glycine max
atggcctcattgggtgggttacaaaatctaagcggcatcaattttcttatcaaaaaagagggtccaaaagtcaatgcgaagttcgagctgaagccgccaccatatccactgaatggtttggagccggtgatgagccagcagacacttgagtttcattgggggaaacaccacaagacatatgtggaaaatctgaaaaaacaaattgttgggacagagcttgatgggaaatcactagaagagattatagtgacatcatataataagggtgacattcttccagctttcaacaatgcagcacaggtatggaaccatgacttcttctgggagtgcatgaaaccaggtggaggtggaaagccatccggggagcttctagaactgattgaaagagactttggctcatttgaaaaattccttgatgagtttaaggctgctgctgcaacacaatttggttcaggatgggcttggcttgcatatagagcaagcaaatttgatggggaaaatgcagcaaatcctccttcaccagatgaggacaacaagctagtggtgctcaagagtcccaatgctgtgaacccccttgtttggggaggctattatccacttcttaccattgatgtttgggagcatgcttacaaccttgattttcagaaccggcgccctgattatatatcagtgttcatggataagcttgtttcctgggatgcagtgagttctagacttgaacaagcaaggctt

SEQ ID NO: 613 - protein, 244 aa, Glycine max
MASLGGLQNLSGINFLIKKEGPKVNAKFELKPPPYPLNGLEPVMSQQTLEFHWGKHHKTYVENLKKQIVGTELDGKSLEEIIVTSYNKGDILPAFNNAAQVWNHDFFWECMKPGGGGKPSGELLELIERDFGSFEKFLDEFKAAAATQFGSGWAWLAYRASKFDGENAANPPSPDEDNKLVVLKSPNAVNPLVWGGYYPLLTIDVWEHAYNLDFQNRRPDYISVFMDKLVSWDAVSSRLEQARL

SEQ ID NO: 614 - protein, 10 aa, Glycine max
QIVGTELDGK

SEQ ID NO: 615 - protein, 12 aa, Glycine max
SLEEIIVTSYNK

SEQ ID NO: 616 - protein, 7 aa, Glycine max
TYVENLK

SEQ ID NO: 617 - DNA, 1419 bp, Glycine max
atggcttctaaggtggtttcggttttggttatagcgatgatgttgtttgccatgaactgtaactgcactagtgttggccacatgccttcaaccaaagaggaaggtcacgattttcaggagtctaaagccaagaccacacaaactgcgaacaaggccatggaaactggtaaagagggacaagaagccgcagagtcatggacagaatgggctaaagagaaactcagtgaaggtcttggcttcaaacatgatcaggaatccaaagaatccaccactaacaaagtctctgattatgccactgacactgcacagaaatccaaggattatgcaactgacactgctcagaaatcaaaggactatgcaggtgatgctgctcagaaatcaaaggactacgcaggtgatgctgctcagaaaaccaaagactatgccagtgacactgcacagacatcaaaggactatgctggtgatgctgctcagaaatcaaagggctatgttggtgatgctgcacaaaagaccaaagaatatgttggtgatgcagcacagaagacaaaggattatgccactgacgcagcacagaagaccaaagattatgctactcagaagaccaaggactatgcaagtgatgcaactgatgctgcaaagaagactaaagattatgctgctcagaagactaaggactatgcaagtgaagctagtgatgttgcacagaacacaaaagattatgctgctcagaagaccaaggactatgccagcggtggtgcgcagaagaccaaggattatgccagcggtggtgcgcagaagaccaaggactatgcaagtgatgctgcgcagaagaccaaggactatgcaagtgatggtgctcaaaagagcaaagaatatgcgggtgatgtagcactgaatgccaaagattatgctcaaaaaagcaaagattacgcaggtgatgctgcacagaatgtcaaagattatgcaagtgatgcagtgcagaagagaaaagagtattctggtgatgcttctcacaagagcaaagaggcttctgattatgccagtgagacggctaagaagaccaaagattatgtcggtgatgctgctcagagaagcaaaggggctgctgaatatgctagtgatgcggctcagaggaccaaagagtatgctggtgatgctaccaagagaagcaaagaggcttctaatgatcatgccaatgacatggctcagaagaccaaagactacgccagtgacactgctcagagaaccaaggaaaaactccaagacattgcatctgaagctggtcaatacagtgcagagaaagctagagaaatgaaggatgcagcagcagagaaggcaagtgacatagcaaaggctgcaaagcaaaaatcacaagaggtgaaagagaaattaggtggacaacaccgggatgccgagctt

SEQ ID NO: 618 - protein, 473 aa, Glycine max
MASKVVSVLVIAMMLFAMNCNCTSVGHMPSTKEEGHDFQESKAKTTQTANKAMETGKEGQEAAESWTEWAKEKLSEGLGFKHDQESKESTTNKVSDYATDTAQKSKDYATDTAQKSKDYAGDAAQKSKDYAGDAAQKTKDYASDTAQTSKDYAGDAAQKSKGYVGDAAQKTKEYVGDAAQKTKDYATDAAQKTKDYATQKTKDYASDATDAAKKTKDYAAQKTKDYASEASDVAQNTKDYAAQKTKDYASGGAQKTKDYASGGAQKTKDYASDAAQKTKDYASDGAQKSKEYAGDVALNAKDYAQKSKDYAGDAAQNVKDYASDAVQKRKEYSGDASHKSKEASDYASETAKKTKDYVGDAAQRSKGAAEYASDAAQRTKEYAGDATKRSKEASNDHANDMAQKTKDYASDTAQRTKEKLQDIASEAGQYSAEKAREMKDAAAEKASDIAKAAKQKSQEVKEKLGGQHRDAEL

SEQ ID NO: 619 - protein, 11 aa, Glycine max
DYAGDAAQNVK

SEQ ID NO: 620 - protein, 9 aa, Glycine max
DYASDAAQK

SEQ ID NO: 621 - protein, 11 aa, Glycine max
DYASDATDAAK

SEQ ID NO: 622 - protein, 9 aa, Glycine max
DYASDAVQK

SEQ ID NO: 623 - protein, 11 aa, Glycine max
DYASDTAQRTK

SEQ ID NO: 624 - protein, 11 aa, Glycine max
DYASDTAQTSK

SEQ ID NO: 625 - protein, 14 aa, Glycine max
DYASEASDVAQNTK

SEQ ID NO: 626 - protein, 9 aa, Glycine max
DYATDAAQK

SEQ ID NO: 627 - protein, 11 aa, Glycine max
DYVGDAAQRSK

SEQ ID NO: 628 - protein, 11 aa, Glycine max
EASDYASETAK

SEQ ID NO: 629 - protein, 11 aa, Glycine max
EYAGDVALNAK

SEQ ID NO: 630 - protein, 9 aa, Glycine max
EYVGDAAQK

SEQ ID NO: 631 - protein, 14 aa, Glycine max
GAAEYASDAAQRTK

SEQ ID NO: 632 - protein, 9 aa, Glycine max
GYVGDAAQK

SEQ ID NO: 633 - protein, 15 aa, Glycine max
LQDIASEAGQYSAEK

SEQ ID NO: 634 - protein, 8 aa, Glycine max
LSEGLGFK

SEQ ID NO: 635 - protein, 11 aa, Glycine max
VSDYATDTAQK

SEQ ID NO: 636 - DNA, 1374 bp, Glycine max
atggcttcgagggtggtttcggttttggtgatagcgatgatgttgtttgccatgaactgtaactgcactagtgttggccacatgccttcaaccaaagaggaaggtcacgattttcaggaggctaaagccaagacaacacaaactgcgaacaaggccatggaaactggtaaagatgggaaagaagccgcagagtcatggacagaatgggctaaagagaaactcactgaaggtcttggcttcaaacatgatcaagaatccaccactaagaaagtctctgactatgccggtgatgctgctcagaaatcaaaggactatgccggtgacactgctcagaaaaccaaggactatgccggtgacactgctcagaaaaccaaggactatgccggtgacactgcacagacatcaaaggactatgccggtgatgctgctcagaaatcaaagggctatgtcggtgatgctgcacaaaagaccaaagaatatgttggtgatgctgctcagaagaccatggattatgccactgatgcagcacagaagaccaaagattatgctactcagaagactaaggactatgcaagtgatgcaactgatgctgcaaaaaagactaaagattatgctgctcagaagaccaaggattatgcaagtgatgcaactgatgctgcaaaaaagactaaggattatgctgcgcagaagaccaaggactatgccagtggtggtgcgcagaagaccaaggactatgccagtggtgctgcgcagaagaccaaggactatgcaagtgatgctgcgcagaggaccaaggaccatgcaagtgatggtgctcaaaagagcaaagaatatgcgggtgatgtagcacagaatgccaaagattatgctcaaaagagcaaagattatgcgggtgatgctgtacagaatatcaaagattatgcaaatgatgcagcgcacaagagcaaagattatgctggtgatgcttctcacaagagcaaagaagcttctgattatgccagtgagacggctcagaagaccaaagactatgttggtgatgctgctcagaaaagcaaagaggcttctgaatatgctagtgatgcggctcagaggaccaaagagtatgctggtgatgccaccaagagaagcaaagaggcttctgatcatgccaatgacatggctcggaagaccaaagactacgccagtgacactgctcagagaaccaaggaaaaactccaagacattgcatctgaggctggtcaatacagtacagagaaggccagagaaatgaaggatgcagcagcagagaaggctagtgacattgcaaaggctgcaaagcaaaaatcacaagagctgaaagacaaattaggtggacaacaccgggatgctgagctt

SEQ ID NO: 637 - protein, 458 aa, Glycine max
MASRVVSVLVIAMMLFAMNCNCTSVGHMPSTKEEGHDFQEAKAKTTQTANKAMETGKDGKEAAESWTEWAKEKLTEGLGFKHDQESTTKKVSDYAGDAAQKSKDYAGDTAQKTKDYAGDTAQKTKDYAGDTAQTSKDYAGDAAQKSKGYVGDAAQKTKEYVGDAAQKTMDYATDAAQKTKDYATQKTKDYASDATDAAKKTKDYAAQKTKDYASDATDAAKKTKDYAAQKTKDYASGGAQKTKDYASGAAQKTKDYASDAAQRTKDHASDGAQKSKEYAGDVAQNAKDYAQKSKDYAGDAVQNIKDYANDAAHKSKDYAGDASHKSKEASDYASETAQKTKDYVGDAAQKSKEASEYASDAAQRTKEYAGDATKRSKEASDHANDMARKTKDYASDTAQRTKEKLQDIASEAGQYSTEKAREMKDAAAEKASDIAKAAKQKSQELKDKLGGQHRDAEL

SEQ ID NO: 638 - protein, 11 aa, Glycine max
DYAGDAVQNIK

SEQ ID NO: 639 - protein, 11 aa, Glycine max
DYASDAAQRTK

SEQ ID NO: 640 - protein, 11 aa, Glycine max
DYASDATDAAK

SEQ ID NO: 641 - protein, 11 aa, Glycine max
DYASDTAQRTK

SEQ ID NO: 642 - protein, 9 aa, Glycine max
DYVGDAAQK

SEQ ID NO: 643 - protein, 12 aa, Glycine max
EASDYASETAQK

SEQ ID NO: 644 - protein, 14 aa, Glycine max
EASEYASDAAQRTK

SEQ ID NO: 645 - protein, 11 aa, Glycine max
EYAGDVAQNAK

SEQ ID NO: 646 - protein, 9 aa, Glycine max
GYVGDAAQK

SEQ ID NO: 647 - protein, 15 aa, Glycine max
LQDIASEAGQYSTEK

SEQ ID NO: 648 - protein, 8 aa, Glycine max
LTEGLGFK

SEQ ID NO: 649 - protein, 11 aa, Glycine max
VSDYAGDAAQK

SEQ ID NO: 650 - protein, 8 aa, Artificial Sequence
  epitope
  misc_feature (1)..(2): Xaa can be any amino acid
  misc_feature (4)..(4): Xaa can be any amino acid
  misc_feature (6)..(8): Xaa can be any amino acid
XXKXEXXX

SEQ ID NO: 651 - protein, 8 aa, Artificial Sequence
  epitope
  misc_feature (1)..(1): Xaa can be any amino acid
  misc_feature (4)..(4): Xaa can be any amino acid
  misc_feature (6)..(8): Xaa can be any amino acid
XTKXEXXX

SEQ ID NO: 652 - protein, 8 aa, Artificial Sequence
  epitope
STKSEGKL

SEQ ID NO: 653 - protein, 9 aa, Artificial Sequence
  epitope
  misc_feature (1)..(3): Xaa can be any amino acid
  misc_feature (8)..(9): Xaa can be any amino acid
XXXKDNVXX

SEQ ID NO: 654 - protein, 9 aa, Artificial Sequence
  epitope
  misc_feature (1)..(1): Xaa can be any amino acid
  misc_feature (3)..(3): Xaa can be any amino acid
  misc_feature (8)..(9): Xaa can be any amino acid
XLXKDNVXX

SEQ ID NO: 655 - protein, 9 aa, Artificial Sequence
  epitope
ALSKDNVDD

SEQ ID NO: 656 - protein, 15 aa, Artificial Sequence
  epitope
  misc_feature (6)..(10): Xaa can be any amino acid
  misc_feature (12)..(15): Xaa can be any amino acid
EEEDDXXXXXEXXXX

SEQ ID NO: 657 - protein, 15 aa, Artificial Sequence
  epitope
EEEDDTEVEAESDAK

SEQ ID NO: 658 - protein, 15 aa, Artificial Sequence
  epitope
LHLKEEAGEYLEESK

SEQ ID NO: 659 - protein, 15 aa, Artificial Sequence
  epitope
SLDISPEATVEEEDD

SEQ ID NO: 660 - protein, 10 aa, Artificial Sequence
  epitope
ESTDKEKKDA

SEQ ID NO: 661 - protein, 9 aa, Artificial Sequence
  epitope
  misc_feature (2)..(3): Xaa can be any amino acid
  misc_feature (6)..(9): Xaa can be any amino acid
DXXDKXXXX

SEQ ID NO: 662 - protein, 9 aa, Artificial Sequence
  epitope
  misc_feature (2)..(3): Xaa can be any amino acid
  misc_feature (6)..(6): Xaa can be any amino acid
  misc_feature (8)..(9): Xaa can be any amino acid
DXXDKXRXX

SEQ ID NO: 663 - protein, 9 aa, Artificial Sequence
  epitope
DALDKIRFE

SEQ ID NO: 664 - protein, 15 aa, Artificial Sequence
  epitope
  misc_feature (1)..(4): Xaa can be any amino acid
  misc_feature (9)..(15): Xaa can be any amino acid
XXXXKSKLXXXXXXX

SEQ ID NO: 665 - protein, 15 aa, Artificial Sequence
  epitope
  misc_feature (1)..(4): Xaa can be any amino acid
  misc_feature (9)..(11): Xaa can be any amino acid
  misc_feature (13)..(15): Xaa can be any amino acid
XXXXKSKLXXXPXXX

SEQ ID NO: 666 - protein, 15 aa, Artificial Sequence
  epitope
SLTDKSKLDAQPELF

SEQ ID NO: 667 - protein, 5 aa, Artificial Sequence
  epitope
  misc_feature (1)..(1): Xaa can be any amino acid
  misc_feature (5)..(5): Xaa can be any amino acid
XPDKX

SEQ ID NO: 668 - protein, 5 aa, Artificial Sequence
  epitope
  misc_feature (5)..(5): Xaa can be any amino acid
IPDKX

SEQ ID NO: 669 - protein, 5 aa, Artificial Sequence
  epitope
IPDKT

SEQ ID NO: 670 - protein, 15 aa, Artificial Sequence
  epitope
DDEDEEEKKDEEGKV

SEQ ID NO: 671 - protein, 15 aa, Artificial Sequence
  epitope
PEYLSFVKGIVDSED

SEQ ID NO: 672 - protein, 15 aa, Artificial Sequence
  epitope
VDSEDLPLNISREML

SEQ ID NO: 673 - protein, 15 aa, Artificial Sequence
  epitope
  misc_feature (1)..(2): Xaa can be any amino acid
  misc_feature (6)..(12): Xaa can be any amino acid
  misc_feature (15)..(15): Xaa can be any amino acid
XXFSKXXXXXXXEDX

SEQ ID NO: 674 - protein, 15 aa, Artificial Sequence
  epitope
  misc_feature (1)..(2): Xaa can be any amino acid
  misc_feature (6)..(12): Xaa can be any amino acid
XXFSKXXXXXXXEDS

SEQ ID NO: 675 - protein, 15 aa, Artificial Sequence
  epitope
EAFSKNLKLGIHEDS

SEQ ID NO: 676 - protein, 15 aa, Artificial Sequence
  epitope
LGDKVEKVVVSDRVV

SEQ ID NO: 677 - protein, 15 aa, Artificial Sequence
  epitope
DEDAGEADADMPPLE

SEQ ID NO: 678 - protein, 15 aa, Artificial Sequence
  epitope
MPPLEDADADAEGSK

SEQ ID NO: 679 - protein, 15 aa, Artificial Sequence
  epitope
  misc_feature (1)..(4): Xaa can be any amino acid
  misc_feature (6)..(9): Xaa can be any amino acid
  misc_feature (11)..(13): Xaa can be any amino acid
  misc_feature (15)..(15): Xaa can be any amino acid
XXXXDXXXXEXXXDX

SEQ ID NO: 680 - protein, 15 aa, Artificial Sequence
  epitope
  misc_feature (1)..(4): Xaa can be any amino acid
  misc_feature (9)..(9): Xaa can be any amino acid
  misc_feature (11)..(13): Xaa can be any amino acid
XXXXDKIRXEXXXDK

SEQ ID NO: 681 - protein, 15 aa, Artificial Sequence
  epitope
SDALDKIRFESLTDK

SEQ ID NO: 682 - protein, 15 aa, Artificial Sequence
  epitope
  misc_feature (1)..(1): Xaa can be any amino acid
  misc_feature (3)..(4): Xaa can be any amino acid
  misc_feature (6)..(9): Xaa can be any amino acid
  misc_feature (12)..(15): Xaa can be any amino acid
XYXXRXXXXQNXXXX

SEQ ID NO: 683 - protein, 15 aa, Artificial Sequence
  epitope
  misc_feature (1)..(1): Xaa can be any amino acid
  misc_feature (3)..(4): Xaa can be any amino acid
  misc_feature (6)..(9): Xaa can be any amino acid
  misc_feature (12)..(15): Xaa can be any amino acid
XYXXRXXXXQNXXXX

SEQ ID NO: 684 - protein, 15 aa, Artificial Sequence
  epitope
DYVTRMKEGQNDIYY

SEQ ID NO: 685 - protein, 15 aa, Artificial Sequence
  epitope
  misc_feature (2)..(4): Xaa can be any amino acid
  misc_feature (6)..(9): Xaa can be any amino acid
  misc_feature (12)..(15): Xaa can be any amino acid
DXXXRXXXXQNXXXX

SEQ ID NO: 686 - protein, 15 aa, Artificial Sequence
  epitope
  misc_feature (2)..(4): Xaa can be any amino acid
  misc_feature (6)..(9): Xaa can be any amino acid
  misc_feature (12)..(15): Xaa can be any amino acid
DXXXRXXXXQNXXXX

SEQ ID NO: 687 - protein, 15 aa, Artificial Sequence
  epitope
DYVTRMKEGQNDIYY

SEQ ID NO: 688 - protein, 15 aa, Artificial Sequence
  epitope
  misc_feature (4)..(11): Xaa can be any amino acid
  misc_feature (14)..(15): Xaa can be any amino acid
RKPXXXXXXXXAAXX

SEQ ID NO: 689 - protein, 15 aa, Artificial Sequence
  epitope
RKPEEITKEEYAAFY

SEQ ID NO: 690 - protein, 9 aa, Artificial Sequence
  epitope
SLTDKSKLD

SEQ ID NO: 691 - protein, 8 aa, Artificial Sequence
  epitope
FIHIIPDK

SEQ ID NO: 692 - protein, 8 aa, Artificial Sequence
  epitope
VTRMKEGQ

SEQ ID NO: 693 - protein, 15 aa, Artificial Sequence
  epitope
  misc_feature (1)..(10): Xaa can be any amino acid
  misc_feature (13)..(13): Xaa can be any amino acid
  misc_feature (15)..(15): Xaa can be any amino acid
XXXXXXXXXXRLXEX

SEQ ID NO: 694 - protein, 15 aa, Artificial Sequence
  epitope
  misc_feature (1)..(3): Xaa can be any amino acid
XXXLKREDEERLDEV

SEQ ID NO: 695 - protein, 15 aa, Artificial Sequence
  epitope
GEPLKREDEERLDEV

SEQ ID NO: 696 - protein, 15 aa, Artificial Sequence
  epitope
  misc_feature (1)..(13): Xaa can be any amino acid
XXXXXXXXXXXXXDE

SEQ ID NO: 697 - protein, 15 aa, Artificial Sequence
  epitope
ILERKKSPNRLVVDE

SEQ ID NO: 698 - protein, 7 aa, Artificial Sequence
  epitope
  misc_feature (1)..(4): Xaa can be any amino acid
XXXXGDR

SEQ ID NO: 699 - protein, 7 aa, Artificial Sequence
  epitope
FPESGDR

SEQ ID NO: 700 - protein, 7 aa, Artificial Sequence
  epitope
SDPKSGK

SEQ ID NO: 701 - protein, 8 aa, Artificial Sequence
  epitope
QTMEKLQL

SEQ ID NO: 702 - protein, 7 aa, Artificial Sequence
  epitope
LGDVVSV

SEQ ID NO: 703 - protein, 15 aa, Artificial Sequence
  epitope
GGMRSVEFKVVETDP

SEQ ID NO: 704 - protein, 15 aa, Artificial Sequence
  epitope
RKAFEEAEKNAPSII

SEQ ID NO: 705 - protein, 8 aa, Artificial Sequence
  epitope
KREKTHGE

SEQ ID NO: 706 - protein, 7 aa, Artificial Sequence
  epitope
RIVSQLL

SEQ ID NO: 707 - protein, 15 aa, Artificial Sequence
  epitope
SRAHVIVIGATNRPN

SEQ ID NO: 708 - protein, 9 aa, Artificial Sequence
  epitope
LRRFGRFDR

SEQ ID NO: 709 - protein, 15 aa, Artificial Sequence
  epitope
MDVIDLEDETIDAEV

SEQ ID NO: 710 - protein, 15 aa, Artificial Sequence
  epitope
VTNEHFQTALGTSNP

SEQ ID NO: 711 - protein, 15 aa, Artificial Sequence
  epitope
VEHPEKFEKFGMSPS

SEQ ID NO: 712 - protein, 8 aa, Artificial Sequence
  epitope
EIFDKARQ

SEQ ID NO: 713 - protein, 15 aa, Artificial Sequence
  epitope
DIIDPALLRPGRLDQ

SEQ ID NO: 714 - protein, 10 aa, Artificial Sequence
  epitope
IRENIEKDIE

SEQ ID NO: 715 - protein, 15 aa, Artificial Sequence
  epitope
IERERKSRENPEAMD

SEQ ID NO: 716 - protein, 15 aa, Artificial Sequence
  epitope
PEAMDEDTVDDEVAE

SEQ ID NO: 717 - protein, 10 aa, Artificial Sequence
  epitope
  misc_feature (1)..(7): Xaa can be any amino acid
XXXXXXXKED

SEQ ID NO: 718 - protein, 10 aa, Artificial Sequence
  epitope
  misc_feature (1)..(5): Xaa can be any amino acid
  misc_feature (7)..(7): Xaa can be any amino acid
XXXXXEXKED

SEQ ID NO: 719 - protein, 10 aa, Artificial Sequence
  epitope
LDKFAENKED

SEQ ID NO: 720 - protein, 7 aa, Artificial Sequence
  epitope
  misc_feature (2)..(3): Xaa can be any amino acid
  misc_feature (7)..(7): Xaa can be any amino acid
KXXLGDX

SEQ ID NO: 721 - protein, 7 aa, Artificial Sequence
  epitope
  misc_feature (3)..(3): Xaa can be any amino acid
  misc_feature (7)..(7): Xaa can be any amino acid
KIXLGDX

SEQ ID NO: 722 - protein, 7 aa, Artificial Sequence
  epitope
KIRLGDT

SEQ ID NO: 723 - protein, 10 aa, Artificial Sequence
  epitope
  misc_feature (1)..(3): Xaa can be any amino acid
  misc_feature (5)..(5): Xaa can be any amino acid
  misc_feature (7)..(7): Xaa can be any amino acid
  misc_feature (9)..(9): Xaa can be any amino acid
XXXDXFXKXE

SEQ ID NO: 724 - protein, 10 aa, Artificial Sequence
  epitope
  misc_feature (1)..(3): Xaa can be any amino acid
  misc_feature (5)..(5): Xaa can be any amino acid
  misc_feature (7)..(7): Xaa can be any amino acid
XXXDXFXKIE

SEQ ID NO: 725 - protein, 10 aa, Artificial Sequence
  epitope
GDTDLFAKIE

SEQ ID NO: 726 - protein, 15 aa, Artificial Sequence
  epitope
IDSCLTVADQYDIQI

SEQ ID NO: 727 - protein, 15 aa, Artificial Sequence
  epitope
NPTRPLTLNTIDEHL

SEQ ID NO: 728 - protein, 15 aa, Artificial Sequence
  epitope
CHHLNREIPEDLAFA

SEQ ID NO: 729 - protein, 15 aa, Artificial Sequence
  epitope
  misc_feature (1)..(3): Xaa can be any amino acid
  misc_feature (5)..(5): Xaa can be any amino acid
  misc_feature (7)..(9): Xaa can be any amino acid
  misc_feature (12)..(13): Xaa can be any amino acid
XXXHXLXXXNKXXEA

SEQ ID NO: 730 - protein, 15 aa, Artificial Sequence
  epitope
  misc_feature (1)..(2): Xaa can be any amino acid
  misc_feature (5)..(5): Xaa can be any amino acid
  misc_feature (7)..(9): Xaa can be any amino acid
  misc_feature (12)..(13): Xaa can be any amino acid
XXVHXLXXXNKXXEA

SEQ ID NO: 731 - protein, 15 aa, Artificial Sequence
  epitope
QRVHALYGLNKRVEA

SEQ ID NO: 732 - protein, 15 aa, Artificial Sequence
  epitope
  misc_feature (1)..(6): Xaa can be any amino acid
  misc_feature (9)..(9): Xaa can be any amino acid
  misc_feature (11)..(11): Xaa can be any amino acid
  misc_feature (13)..(13): Xaa can be any amino acid
  misc_feature (15)..(15): Xaa can be any amino acid
XXXXXXGLXKXRXEX

SEQ ID NO: 733 - protein, 15 aa, Artificial Sequence
  epitope
  misc_feature (1)..(6): Xaa can be any amino acid
  misc_feature (9)..(9): Xaa can be any amino acid
  misc_feature (11)..(11): Xaa can be any amino acid
  misc_feature (13)..(13): Xaa can be any amino acid
XXXXXXGLXKXRXEG

SEQ ID NO: 734 - protein, 15 aa, Artificial Sequence
  epitope
KAHEIAGLRKERAEG

SEQ ID NO: 735 - protein, 15 aa, Artificial Sequence
  epitope
ERAEGKFVPDPRFEE

SEQ ID NO: 736 - protein, 15 aa, Artificial Sequence
  epitope
RSGIFGSYNYDELMG

SEQ ID NO: 737 - protein, 15 aa, Artificial Sequence
  epitope
DELMGSLEGNEGFGR

SEQ ID NO: 738 - protein, 15 aa, Artificial Sequence
  epitope
LNTAGSYKFSSDRTI

SEQ ID NO: 739 - protein, 15 aa, Artificial Sequence
  epitope
AAEKYKSEGHDMIIL

SEQ ID NO: 740 - protein, 15 aa, Artificial Sequence
  epitope
DSLGLTGHERYTIDL

SEQ ID NO: 741 - protein, 15 aa, Artificial Sequence
  epitope
IRKVVELQEELDIDV

SEQ ID NO: 742 - protein, 15 aa, Artificial Sequence
  epitope
  misc_feature (1)..(7): Xaa can be any amino acid
  misc_feature (10)..(10): Xaa can be any amino acid
  misc_feature (14)..(14): Xaa can be any amino acid
XXXXXXXKDXVEDXE

SEQ ID NO: 743 - protein, 15 aa, Artificial Sequence
  epitope
  misc_feature (1)..(7): Xaa can be any amino acid
  misc_feature (14)..(14): Xaa can be any amino acid
XXXXXXXKDEVEDXE

SEQ ID NO: 744 - protein, 15 aa, Artificial Sequence
  epitope
YQIALSIKDEVEDLE

SEQ ID NO: 745 - protein, 10 aa, Artificial Sequence
  epitope
  misc_feature (1)..(2): Xaa can be any amino acid
  misc_feature (4)..(7): Xaa can be any amino acid
  misc_feature (10)..(10): Xaa can be any amino acid
XXEXXXXKDX

SEQ ID NO: 746 - protein, 10 aa, Artificial Sequence
  epitope
  misc_feature (2)..(2): Xaa can be any amino acid
  misc_feature (4)..(7): Xaa can be any amino acid
  misc_feature (10)..(10): Xaa can be any amino acid
NXEXXXXKDX

SEQ ID NO: 747 - protein, 10 aa, Artificial Sequence
  epitope
NPETYILKDQ

SEQ ID NO: 748 - protein, 8 aa, Artificial Sequence
  epitope
  misc_feature (6)..(6): Xaa can be any amino acid
LDFLEXET

SEQ ID NO: 749 - protein, 8 aa, Artificial Sequence
  epitope
LDFLEVET

SEQ ID NO: 750 - protein, 9 aa, Artificial Sequence
  epitope
QYTEGDKRV

SEQ ID NO: 751 - protein, 10 aa, Artificial Sequence
  epitope
  misc_feature (3)..(3): Xaa can be any amino acid
  misc_feature (6)..(10): Xaa can be any amino acid
PLXQQXXXXX

SEQ ID NO: 752 - protein, 10 aa, Artificial Sequence
  epitope
  misc_feature (3)..(3): Xaa can be any amino acid
  misc_feature (7)..(10): Xaa can be any amino acid
PLXQQGXXXX

SEQ ID NO: 753 - protein, 10 aa, Artificial Sequence
  epitope
PLVQQGQQGQ

SEQ ID NO: 754 - protein, 8 aa, Artificial Sequence
  epitope
LGEMNGKM

SEQ ID NO: 755 - protein, 15 aa, Artificial Sequence
  epitope
KVITLSVEDQDYMGR

SEQ ID NO: 756 - protein, 15 aa, Artificial Sequence
  epitope
  misc_feature (1)..(2): Xaa can be any amino acid
  misc_feature (4)..(14): Xaa can be any amino acid
XXGXXXXXXXXXXXE

SEQ ID NO: 757 - protein, 15 aa, Artificial Sequence
  epitope
  misc_feature (1)..(2): Xaa can be any amino acid
  misc_feature (4)..(4): Xaa can be any amino acid
  misc_feature (6)..(9): Xaa can be any amino acid
  misc_feature (11)..(11): Xaa can be any amino acid
  misc_feature (14)..(14): Xaa can be any amino acid
XXGXLXXXXGXRTXE

SEQ ID NO: 758 - protein, 15 aa, Artificial Sequence
  epitope
ASGKLSQYEGGRTKE

SEQ ID NO: 759 - protein, 15 aa, Artificial Sequence
  epitope
  misc_feature (1)..(5): Xaa can be any amino acid
  misc_feature (8)..(11): Xaa can be any amino acid
XXXXXLLXXXXEEDN

SEQ ID NO: 760 - protein, 15 aa, Artificial Sequence
  epitope
  misc_feature (1)..(5): Xaa can be any amino acid
  misc_feature (9)..(11): Xaa can be any amino acid
XXXXXLLEXXXEEDN

SEQ ID NO: 761 - protein, 15 aa, Artificial Sequence
  epitope
EKSDNLLEGGGEEDN

SEQ ID NO: 762 - protein, 15 aa, Artificial Sequence
  epitope
  misc_feature (3)..(11): Xaa can be any amino acid
  misc_feature (13)..(13): Xaa can be any amino acid
  misc_feature (15)..(15): Xaa can be any amino acid
RKXXXXXXXXXYXNX

SEQ ID NO: 763 - protein, 15 aa, Artificial Sequence
  epitope
  misc_feature (6)..(10): Xaa can be any amino acid
  misc_feature (15)..(15): Xaa can be any amino acid
RKDHSXXXXXLYANX

SEQ ID NO: 764 - protein, 15 aa, Artificial Sequence
  epitope
RKDHSDVSNQLYANY

SEQ ID NO: 765 - protein, 15 aa, Artificial Sequence
  epitope
  misc_feature (1)..(1): Xaa can be any amino acid
  misc_feature (4)..(15): Xaa can be any amino acid
XGKXXXXXXXXXXXX

SEQ ID NO: 766 - protein, 15 aa, Artificial Sequence
  epitope
QGKEYVFVANSDNLG

SEQ ID NO: 767 - protein, 15 aa, Artificial Sequence
  epitope
IAKYGLDDNTIDFIG

SEQ ID NO: 768 - protein, 15 aa, Artificial Sequence
  epitope
EETREKKEEESRERE

SEQ ID NO: 769 - protein, 15 aa, Artificial Sequence
  epitope
  misc_feature (1)..(7): Xaa can be any amino acid
  misc_feature (9)..(10): Xaa can be any amino acid
XXXXXXXNXXIFEED

SEQ ID NO: 770 - protein, 15 aa, Artificial Sequence
  epitope
  misc_feature (1)..(7): Xaa can be any amino acid
  misc_feature (9)..(9): Xaa can be any amino acid
XXXXXXXNXYIFEED

SEQ ID NO: 771 - protein, 15 aa, Artificial Sequence
  epitope
QHEEQDENPYIFEED

SEQ ID NO: 772 - protein, 15 aa, Artificial Sequence
  epitope
SIFAISREQVRALAP

SEQ ID NO: 773 - protein, 10 aa, Artificial Sequence
  epitope
  misc_feature (1)..(1): Xaa can be any amino acid
  misc_feature (7)..(7): Xaa can be any amino acid
  misc_feature (9)..(10): Xaa can be any amino acid
XELPREXRXX

SEQ ID NO: 774 - protein, 10 aa, Artificial Sequence
  epitope
  misc_feature (1)..(1): Xaa can be any amino acid
  misc_feature (9)..(10): Xaa can be any amino acid
XELPREERXX

SEQ ID NO: 775 - protein, 10 aa, Artificial Sequence
  epitope
FELPREERGR

SEQ ID NO: 776 - protein, 15 aa, Artificial Sequence
  epitope
  misc_feature (1)..(5): Xaa can be any amino acid
  misc_feature (9)..(12): Xaa can be any amino acid
  misc_feature (15)..(15): Xaa can be any amino acid
XXXXXPLYXXXXDEX

SEQ ID NO: 777 - protein, 15 aa, Artificial Sequence
  epitope
  misc_feature (1)..(5): Xaa can be any amino acid
  misc_feature (10)..(12): Xaa can be any amino acid
  misc_feature (15)..(15): Xaa can be any amino acid
XXXXXPLYIXXXDEX

SEQ ID NO: 778 - protein, 15 aa, Artificial Sequence
  epitope
IPAGTPLYIVNRDEN

SEQ ID NO: 779 - protein, 15 aa, Artificial Sequence
  epitope
  misc_feature (1)..(8): Xaa can be any amino acid
  misc_feature (10)..(10): Xaa can be any amino acid
  misc_feature (13)..(15): Xaa can be any amino acid
XXXXXXXXRXRRXXX

SEQ ID NO: 780 - protein, 15 aa, Artificial Sequence
  epitope
  misc_feature (1)..(5): Xaa can be any amino acid
  misc_feature (7)..(8): Xaa can be any amino acid
  misc_feature (10)..(10): Xaa can be any amino acid
  misc_feature (13)..(15): Xaa can be any amino acid
XXXXXSXXRXRRXXX

SEQ ID NO: 781 - protein, 15 aa, Artificial Sequence
  epitope
PFELPSEERGRRAVA

SEQ ID NO: 782 - protein, 15 aa, Artificial Sequence
  epitope
  misc_feature (1)..(10): Xaa can be any amino acid
  misc_feature (14)..(15): Xaa can be any amino acid
XXXXXXXXXXEEEXX

SEQ ID NO: 783 - protein, 15 aa, Artificial Sequence
  epitope
  misc_feature (1)..(1): Xaa can be any amino acid
  misc_feature (9)..(10): Xaa can be any amino acid
  misc_feature (15)..(15): Xaa can be any amino acid
XKEEEHQEXXEEEQX

SEQ ID NO: 784 - protein, 15 aa, Artificial Sequence
  epitope
EKEEEHQEQHEEEQD

SEQ ID NO: 785 - protein, 15 aa, Artificial Sequence
  epitope
  misc_feature (1)..(2): Xaa can be any amino acid
  misc_feature (5)..(15): Xaa can be any amino acid
XXGKXXXXXXXXXXX

SEQ ID NO: 786 - protein, 15 aa, Artificial Sequence
  epitope
FAGKDNIVSSLDNVA

SEQ ID NO: 787 - protein, 10 aa, Artificial Sequence
  epitope
SNLALGKLKE

SEQ ID NO: 788 - protein, 15 aa, Artificial Sequence
  epitope
EGGEKGNKDRPELKT

SEQ ID NO: 789 - protein, 8 aa, Artificial Sequence
  epitope
LNTTTQTA

SEQ ID NO: 790 - protein, 15 aa, Artificial Sequence
  epitope
QQGYAVTKDTISSAA

SEQ ID NO: 791 - protein, 8 aa, Artificial Sequence
  epitope
KKPSQPQE

SEQ ID NO: 792 - protein, 15 aa, Artificial Sequence
  epitope
IGEKLGDAKQREELL

SEQ ID NO: 793 - protein, 5 aa, Artificial Sequence
  epitope
ETKDT

SEQ ID NO: 794 - protein, 8 aa, Artificial Sequence
  epitope
VAYPLDLF

SEQ ID NO: 795 - protein, 9 aa, Artificial Sequence
  epitope
KDDENVNSQ

SEQ ID NO: 796 - protein, 15 aa, Artificial Sequence
  epitope
CAEAIFKSQAETGEI

SEQ ID NO: 797 - protein, 9 aa, Artificial Sequence
  epitope
GHYLNATAG

SEQ ID NO: 798 - protein, 5 aa, Artificial Sequence
  epitope
LHIHR

SEQ ID NO: 799 - protein, 15 aa, Artificial Sequence
  epitope
DDFVEKDRSRGIYFT

SEQ ID NO: 800 - protein, 7 aa, Artificial Sequence
  epitope
WGNAPGA

SEQ ID NO: 801 - protein, 15 aa, Artificial Sequence
  epitope
RNEGRDLAREGNEII

SEQ ID NO: 802 - protein, 15 aa, Artificial Sequence
  epitope
VWKEIKFEFEAMDTL

SEQ ID NO: 803 - protein, 15 aa, Artificial Sequence
  epitope
HPGDGASGRLSNATG

SEQ ID NO: 804 - protein, 15 aa, Artificial Sequence
  epitope
VIRIVSEQTDILEPF

SEQ ID NO: 805 - protein, 15 aa, Artificial Sequence
  epitope
ATSGDRDGKTFVSTA

SEQ ID NO: 806 - protein, 15 aa, Artificial Sequence
  epitope
PVTVNLWQPEKNAFE

SEQ ID NO: 807 - protein, 7 aa, Artificial Sequence
  epitope
AIRVTQS

SEQ ID NO: 808 - protein, 15 aa, Artificial Sequence
  epitope
SEARKSTNTPDAQKV

SEQ ID NO: 809 - protein, 15 aa, Artificial Sequence
  epitope
ILWHLTKEDKTYGVP

SEQ ID NO: 810 - protein, 15 aa, Artificial Sequence
  epitope
VAFSIDNRQIVSASR

SEQ ID NO: 811 - protein, 9 aa, Artificial Sequence
  epitope
RLYSLDAGS

SEQ ID NO: 812 - protein, 9 aa, Artificial Sequence
  epitope
DLKVDLKTE

SEQ ID NO: 813 - protein, 15 aa, Artificial Sequence
  epitope
KSGEERAQEEAIDID

SEQ ID NO: 814 - protein, 15 aa, Artificial Sequence
  epitope
DNQLVAADAKLNFDD

SEQ ID NO: 815 - protein, 15 aa, Artificial Sequence
  epitope
FLDVGGNASENQVVE

SEQ ID NO: 816 - protein, 15 aa, Artificial Sequence
  epitope
VRFYKEEEKNDPEFA

SEQ ID NO: 817 - protein, 7 aa, Artificial Sequence
  epitope
  misc_feature (4)..(7): Xaa can be any amino acid
FDKXXXX

SEQ ID NO: 818 - protein, 7 aa, Artificial Sequence
  epitope
  misc_feature (5)..(7): Xaa can be any amino acid
FDKFXXX

SEQ ID NO: 819 - protein, 7 aa, Artificial Sequence
  epitope
FDKFATG

SEQ ID NO: 820 - protein, 15 aa, Artificial Sequence
  epitope
GKPLVIEEVEVAPPQ

SEQ ID NO: 821 - protein, 10 aa, Artificial Sequence
  epitope
  misc_feature (1)..(1): Xaa can be any amino acid
  misc_feature (3)..(6): Xaa can be any amino acid
XQXXXXENKP

SEQ ID NO: 822 - protein, 10 aa, Artificial Sequence
  epitope
  misc_feature (3)..(3): Xaa can be any amino acid
  misc_feature (5)..(6): Xaa can be any amino acid
EQXQXXENKP

SEQ ID NO: 823 - protein, 10 aa, Artificial Sequence
  epitope
EQHQHDENKP

SEQ ID NO: 824 - protein, 15 aa, Artificial Sequence
  epitope
  misc_feature (1)..(1): Xaa can be any amino acid
  misc_feature (3)..(6): Xaa can be any amino acid
  misc_feature (9)..(15): Xaa can be any amino acid
XKXXXXEKXXXXXXX

SEQ ID NO: 825 - protein, 15 aa, Artificial Sequence
  epitope
  misc_feature (1)..(1): Xaa can be any amino acid
  misc_feature (4)..(6): Xaa can be any amino acid
  misc_feature (9)..(13): Xaa can be any amino acid
  misc_feature (15)..(15): Xaa can be any amino acid
XKDXXXEKXXXXXDX

SEQ ID NO: 826 - protein, 15 aa, Artificial Sequence
  epitope
YKDYTAEKAIEGKDS

SEQ ID NO: 827 - protein, 15 aa, Artificial Sequence
  epitope
  misc_feature (1)..(3): Xaa can be any amino acid
  misc_feature (5)..(6): Xaa can be any amino acid
  misc_feature (10)..(13): Xaa can be any amino acid
  misc_feature (15)..(15): Xaa can be any amino acid
XXXDXXREEXXXXRX

SEQ ID NO: 828 - protein, 15 aa, Artificial Sequence
  epitope
  misc_feature (1)..(3): Xaa can be any amino acid
  misc_feature (5)..(6): Xaa can be any amino acid
  misc_feature (12)..(13): Xaa can be any amino acid
  misc_feature (15)..(15): Xaa can be any amino acid
XXXDXXREEEEXXRX

SEQ ID NO: 829 - protein, 15 aa, Artificial Sequence
  epitope
GNKDQTREEEEETRR

SEQ ID NO: 830 - protein, 15 aa, Artificial Sequence
  epitope
KETKMGEYSDYATQK

SEQ ID NO: 831 - protein, 15 aa, Artificial Sequence
  epitope
QKAGEYTDYAAQKAK

SEQ ID NO: 832 - protein, 15 aa, Artificial Sequence
  epitope
TTVQKAGEYKDYTAE

SEQ ID NO: 833 - protein, 15 aa, Artificial Sequence
  epitope
KDTTVQKAGEYKDYT

SEQ ID NO: 834 - protein, 15 aa, Artificial Sequence
  epitope
DGDMEEEGVLHVERR

SEQ ID NO: 835 - protein, 15 aa, Artificial Sequence
  epitope
EEEGVLHVERRREKM

SEQ ID NO: 836 - protein, 10 aa, Artificial Sequence
  epitope
  misc_feature (1)..(7): Xaa can be any amino acid
XXXXXXXDKP

SEQ ID NO: 837 - protein, 10 aa, Artificial Sequence
  epitope
  misc_feature (1)..(5): Xaa can be any amino acid
  misc_feature (7)..(7): Xaa can be any amino acid
XXXXXFXDKP

SEQ ID NO: 838 - protein, 10 aa, Artificial Sequence
  epitope
EKTLLFGDKP

SEQ ID NO: 839 - protein, 15 aa, Artificial Sequence
  epitope
KLKGILGYTEDDVVS

SEQ ID NO: 840 - protein, 15 aa, Artificial Sequence
  epitope
  misc_feature (1)..(11): Xaa can be any amino acid
  misc_feature (14)..(14): Xaa can be any amino acid
XXXXXXXXXXXDDXE

SEQ ID NO: 841 - protein, 15 aa, Artificial Sequence
  epitope
  misc_feature (2)..(11): Xaa can be any amino acid
  misc_feature (14)..(14): Xaa can be any amino acid
LXXXXXXXXXXDDXE

SEQ ID NO: 842 - protein, 15 aa, Artificial Sequence
  epitope
LEFTQGDLRNRDDLE

SEQ ID NO: 843 - protein, 15 aa, Artificial Sequence
  epitope
SVSIIDNFDNSVVEA

SEQ ID NO: 844 - protein, 15 aa, Artificial Sequence
  epitope
EKIPCEEDFRLQAMN

SEQ ID NO: 845 - protein, 15 aa, Artificial Sequence
  epitope
PELNVYGHDYPTRDG

SEQ ID NO: 846 - protein, 15 aa, Artificial Sequence
  epitope
PTRDGSAIRDYIHVM

SEQ ID NO: 847 - protein, 15 aa, Artificial Sequence
  epitope
  misc_feature (1)..(4): Xaa can be any amino acid
  misc_feature (7)..(9): Xaa can be any amino acid
  misc_feature (12)..(14): Xaa can be any amino acid
XXXXDKXXXERXXXE

SEQ ID NO: 848 - protein, 15 aa, Artificial Sequence
  epitope
  misc_feature (1)..(4): Xaa can be any amino acid
  misc_feature (9)..(9): Xaa can be any amino acid
  misc_feature (12)..(14): Xaa can be any amino acid
XXXXDKRVXERXXXE

SEQ ID NO: 849 - protein, 15 aa, Artificial Sequence
  epitope
LGGIDKRVIERFEKE

SEQ ID NO: 850 - protein, 15 aa, Artificial Sequence
  epitope
GGFEAGISKDGQTRE

SEQ ID NO: 851 - protein, 9 aa, Artificial Sequence
  epitope
  misc_feature (4)..(4): Xaa can be any amino acid
  misc_feature (7)..(9): Xaa can be any amino acid
PISXFEXXX

SEQ ID NO: 852 - protein, 9 aa, Artificial Sequence
  epitope
  misc_feature (7)..(9): Xaa can be any amino acid
PISGFEXXX

SEQ ID NO: 853 - protein, 9 aa, Artificial Sequence
  epitope
PISGFEGDN

SEQ ID NO: 854 - protein, 10 aa, Artificial Sequence
  epitope
  misc_feature (1)..(2): Xaa can be any amino acid
  misc_feature (4)..(4): Xaa can be any amino acid
  misc_feature (7)..(10): Xaa can be any amino acid
XXEXLDXXXX

SEQ ID NO: 855 - protein, 10 aa, Artificial Sequence
  epitope
  misc_feature (4)..(4): Xaa can be any amino acid
  misc_feature (7)..(10): Xaa can be any amino acid
LLEXLDXXXX

SEQ ID NO: 856 - protein, 10 aa, Artificial Sequence
  epitope
LLEALDQINE

SEQ ID NO: 857 - protein, 15 aa, Artificial Sequence
  epitope
GTVEDIDEPRLERVF

SEQ ID NO: 858 - protein, 15 aa, Artificial Sequence
  epitope
WTPLIPASFKEEETA

SEQ ID NO: 859 - protein, 8 aa, Artificial Sequence
  epitope
  misc_feature (2)..(5): Xaa can be any amino acid
KXXXXQQQ

SEQ ID NO: 860 - protein, 8 aa, Artificial Sequence
  epitope
  misc_feature (2)..(4): Xaa can be any amino acid
KXXXQQQQ

SEQ ID NO: 861 - protein, 8 aa, Artificial Sequence
  epitope
KFPPQQQQ

SEQ ID NO: 862 - protein, 7 aa, Artificial Sequence
  epitope
  misc_feature (4)..(7): Xaa can be any amino acid
RGKXXXX

SEQ ID NO: 863 - protein, 7 aa, Artificial Sequence
  epitope
  misc_feature (4)..(7): Xaa can be any amino acid
RGKXXXX

SEQ ID NO: 864 - protein, 7 aa, Artificial Sequence
  epitope
RGKVEAE

SEQ ID NO: 865 - protein, 10 aa, Artificial Sequence
  epitope
  misc_feature (1)..(1): Xaa can be any amino acid
  misc_feature (5)..(10): Xaa can be any amino acid
XRGKXXXXXX

SEQ ID NO: 866 - protein, 10 aa, Artificial Sequence
  epitope
  misc_feature (5)..(10): Xaa can be any amino acid
RRGKXXXXXX

SEQ ID NO: 867 - protein, 10 aa, Artificial Sequence
  epitope
RRGKESGGGG

SEQ ID NO: 868 - protein, 15 aa, Artificial Sequence
  epitope
  misc_feature (2)..(2): Xaa can be any amino acid
  misc_feature (4)..(14): Xaa can be any amino acid
RXKXXXXXXXXXXXE

SEQ ID NO: 869 - protein, 15 aa, Artificial Sequence
  epitope
RNKQANKGNEEGRRE

SEQ ID NO: 870 - protein, 15 aa, Artificial Sequence
  epitope
  misc_feature (1)..(7): Xaa can be any amino acid
  misc_feature (10)..(14): Xaa can be any amino acid
XXXXXXXRRXXXXXR

SEQ ID NO: 871 - protein, 15 aa, Artificial Sequence
  epitope
MASEQMPRRENNSNR

SEQ ID NO: 872 - protein, 15 aa, Artificial Sequence
  epitope
  misc_feature (1)..(3): Xaa can be any amino acid
  misc_feature (9)..(9): Xaa can be any amino acid
  misc_feature (11)..(15): Xaa can be any amino acid
XXXKGRVVXEXXXXX

SEQ ID NO: 873 - protein, 15 aa, Artificial Sequence
  epitope
  misc_feature (9)..(9): Xaa can be any amino acid
LPDKGRVVXESEKKE

SEQ ID NO: 874 - protein, 15 aa, Artificial Sequence
  epitope
LPDKGRVVIESEKKE

SEQ ID NO: 875 - protein, 15 aa, Artificial Sequence
  epitope
  misc_feature (7)..(8): Xaa can be any amino acid
  misc_feature (11)..(15): Xaa can be any amino acid
ATKAKDXXREXXXXX

SEQ ID NO: 876 - protein, 15 aa, Artificial Sequence
  epitope
  misc_feature (11)..(15): Xaa can be any amino acid
ATKAKDVTREXXXXX

SEQ ID NO: 877 - protein, 15 aa, Artificial Sequence
  epitope
ATKAKDVTREKGQQG

SEQ ID NO: 878 - protein, 15 aa, Artificial Sequence
  epitope
  misc_feature (1)..(1): Xaa can be any amino acid
  misc_feature (3)..(3): Xaa can be any amino acid
  misc_feature (7)..(7): Xaa can be any amino acid
  misc_feature (10)..(15): Xaa can be any amino acid
XGXKGQXKKXXXXXX

SEQ ID NO: 879 - protein, 15 aa, Artificial Sequence
  epitope
  misc_feature (1)..(1): Xaa can be any amino acid
  misc_feature (3)..(3): Xaa can be any amino acid
  misc_feature (10)..(11): Xaa can be any amino acid
XGXKGQTKKXXGEEQ

SEQ ID NO: 880 - protein, 15 aa, Artificial Sequence
  epitope
AGTKGQTKKGGGEEQ

SEQ ID NO: 881 - protein, 10 aa, Artificial Sequence
  epitope
  misc_feature (2)..(4): Xaa can be any amino acid
  misc_feature (10)..(10): Xaa can be any amino acid
RXXXETKEGX

SEQ ID NO: 882 - protein, 10 aa, Artificial Sequence
  epitope
REKAETKEGG

SEQ ID NO: 883 - protein, 10 aa, Artificial Sequence
  epitope
  misc_feature (1)..(4): Xaa can be any amino acid
XXXXNKQSSL

SEQ ID NO: 884 - protein, 10 aa, Artificial Sequence
  epitope
IGEENKQSSL

SEQ ID NO: 885 - protein, 15 aa, Artificial Sequence
  epitope
  misc_feature (1)..(1): Xaa can be any amino acid
  misc_feature (3)..(3): Xaa can be any amino acid
  misc_feature (6)..(13): Xaa can be any amino acid
  misc_feature (15)..(15): Xaa can be any amino acid
XKXVAXXXXXXXXEX

SEQ ID NO: 886 - protein, 15 aa, Artificial Sequence
  epitope
  misc_feature (1)..(1): Xaa can be any amino acid
  misc_feature (3)..(3): Xaa can be any amino acid
  misc_feature (7)..(9): Xaa can be any amino acid
  misc_feature (11)..(11): Xaa can be any amino acid
XKXVAEXXXQXASEL

SEQ ID NO: 887 - protein, 15 aa, Artificial Sequence
  epitope
VKGVAEYAGQKASEL

SEQ ID NO: 888 - protein, 10 aa, Artificial Sequence
  epitope
  misc_feature (1)..(2): Xaa can be any amino acid
  misc_feature (8)..(10): Xaa can be any amino acid
XXKVEAEXXX

SEQ ID NO: 889 - protein, 10 aa, Artificial Sequence
  epitope
RKKVEAEMDL

SEQ ID NO: 890 - protein, 10 aa, Artificial Sequence
  epitope
  misc_feature (1)..(4): Xaa can be any amino acid
XXXXIAEIAE

SEQ ID NO: 891 - protein, 10 aa, Artificial Sequence
  epitope
  misc_feature (1)..(2): Xaa can be any amino acid
XXETIAEIAE

SEQ ID NO: 892 - protein, 10 aa, Artificial Sequence
  epitope
IGETIAEIAE

SEQ ID NO: 893 - protein, 15 aa, Artificial Sequence
  epitope
  misc_feature (1)..(1): Xaa can be any amino acid
  misc_feature (3)..(4): Xaa can be any amino acid
  misc_feature (6)..(6): Xaa can be any amino acid
  misc_feature (8)..(11): Xaa can be any amino acid
  misc_feature (15)..(15): Xaa can be any amino acid
XYXXSXKXXXXEKVX

SEQ ID NO: 894 - protein, 15 aa, Artificial Sequence
  epitope
  misc_feature (1)..(1): Xaa can be any amino acid
  misc_feature (4)..(4): Xaa can be any amino acid
  misc_feature (6)..(6): Xaa can be any amino acid
  misc_feature (8)..(11): Xaa can be any amino acid
  misc_feature (15)..(15): Xaa can be any amino acid
XYIXSXKXXXXEKVX

SEQ ID NO: 895 - protein, 15 aa, Artificial Sequence
  epitope
LYIASVKANAVEKVE

SEQ ID NO: 896 - protein, 5 aa, Artificial Sequence
  epitope
  misc_feature (3)..(3): Xaa can be any amino acid
YEXGV

SEQ ID NO: 897 - protein, 5 aa, Artificial Sequence
  epitope
  misc_feature (3)..(3): Xaa can be any amino acid
YEXGV

SEQ ID NO: 898 - protein, 5 aa, Artificial Sequence
  epitope
YEAGV

SEQ ID NO: 899 - protein, 15 aa, Artificial Sequence
  epitope
AREAAARDAREAAAR

SEQ ID NO: 900 - protein, 9 aa, Artificial Sequence
  epitope
  misc_feature (1)..(5): Xaa can be any amino acid
  misc_feature (9)..(9): Xaa can be any amino acid
XXXXXVTAX

SEQ ID NO: 901 - protein, 9 aa, Artificial Sequence
  epitope
  misc_feature (2)..(5): Xaa can be any amino acid
  misc_feature (9)..(9): Xaa can be any amino acid
VXXXXVTAX

SEQ ID NO: 902 - protein, 9 aa, Artificial Sequence
  epitope
VKRTTVTAT

SEQ ID NO: 903 - protein, 15 aa, Artificial Sequence
  epitope
AWGVEPYDLDDADRN

SEQ ID NO: 904 - protein, 15 aa, Artificial Sequence
  epitope
  misc_feature (1)..(2): Xaa can be any amino acid
  misc_feature (4)..(10): Xaa can be any amino acid
  misc_feature (14)..(15): Xaa can be any amino acid
XXWXXXXXXXEKEXX

SEQ ID NO: 905 - protein, 15 aa, Artificial Sequence
  epitope
  misc_feature (1)..(2): Xaa can be any amino acid
  misc_feature (4)..(7): Xaa can be any amino acid
  misc_feature (9)..(10): Xaa can be any amino acid
  misc_feature (15)..(15): Xaa can be any amino acid
XXWXXXXEXXEKESX

SEQ ID NO: 906 - protein, 15 aa, Artificial Sequence
  epitope
INWKYASEVYEKESS

SEQ ID NO: 907 - protein, 15 aa, Artificial Sequence
  epitope
  misc_feature (1)..(4): Xaa can be any amino acid
  misc_feature (12)..(12): Xaa can be any amino acid
XXXXEEEREHAXQLI

SEQ ID NO: 908 - protein, 15 aa, Artificial Sequence
  epitope
KESSEEEREHAEQLI

SEQ ID NO: 909 - protein, 15 aa, Artificial Sequence
  epitope
KESSEEEREHAEQLI

SEQ ID NO: 910 - protein, 15 aa, Artificial Sequence
  epitope
PDGILAYLDEENKPQ

SEQ ID NO: 911 - protein, 15 aa, Artificial Sequence
  epitope
CSLKHVPGFIERAEE

SEQ ID NO: 912 - protein, 15 aa, Artificial Sequence
  epitope
ALGLELDLTDKGLGV

SEQ ID NO: 913 - protein, 9 aa, Artificial Sequence
  epitope
  misc_feature (1)..(1): Xaa can be any amino acid
  misc_feature (3)..(3): Xaa can be any amino acid
  misc_feature (5)..(7): Xaa can be any amino acid
  misc_feature (9)..(9): Xaa can be any amino acid
XDXDXXXDX

SEQ ID NO: 914 - protein, 9 aa, Artificial Sequence
  epitope
  misc_feature (1)..(1): Xaa can be any amino acid
  misc_feature (5)..(7): Xaa can be any amino acid
  misc_feature (9)..(9): Xaa can be any amino acid
XDIDXXXDX

SEQ ID NO: 915 - protein, 9 aa, Artificial Sequence
  epitope
WDIDYQLDL

SEQ ID NO: 916 - protein, 15 aa, Artificial Sequence
  epitope
KADAGASKTYPQQAG

SEQ ID NO: 917 - protein, 15 aa, Artificial Sequence
  epitope
CDVPHVNRTDYQLID

SEQ ID NO: 918 - protein, 15 aa, Artificial Sequence
  epitope
FAEGKDLVVSVMSAM

SEQ ID NO: 919 - protein, 9 aa, Artificial Sequence
  epitope
  misc_feature (1)..(6): Xaa can be any amino acid
XXXXXXFDK

SEQ ID NO: 920 - protein, 9 aa, Artificial Sequence
  epitope
  misc_feature (1)..(4): Xaa can be any amino acid
  misc_feature (6)..(6): Xaa can be any amino acid
XXXXPXFDK

SEQ ID NO: 921 - protein, 9 aa, Artificial Sequence
  epitope
KAEFPIFDK

SEQ ID NO: 922 - protein, 15 aa, Artificial Sequence
  epitope
WNFSKFLVDKDGNVV

SEQ ID NO: 923 - protein, 5 aa, Artificial Sequence
  epitope
KSRDD

SEQ ID NO: 924 - protein, 15 aa, Artificial Sequence
  epitope
PSQPAESKGEESGGG

SEQ ID NO: 925 - protein, 9 aa, Artificial Sequence
  epitope
  misc_feature (1)..(4): Xaa can be any amino acid
  misc_feature (7)..(9): Xaa can be any amino acid
XXXXKQXXX

SEQ ID NO: 926 - protein, 9 aa, Artificial Sequence
  epitope
  misc_feature (1)..(2): Xaa can be any amino acid
  misc_feature (4)..(4): Xaa can be any amino acid
  misc_feature (7)..(9): Xaa can be any amino acid
XXDXKQXXX

SEQ ID NO: 927 - protein, 9 aa, Artificial Sequence
  epitope
KLDDKQGIG

SEQ ID NO: 928 - protein, 15 aa, Artificial Sequence
  epitope
SIEQKEESRGNEDHV

SEQ ID NO: 929 - protein, 15 aa, Artificial Sequence
  epitope
FKTGAERKEAAESTL

SEQ ID NO: 930 - protein, 15 aa, Artificial Sequence
  epitope
ELDTLGEESYKDSTL

SEQ ID NO: 931 - protein, 15 aa, Artificial Sequence
  epitope
  misc_feature (1)..(6): Xaa can be any amino acid
  misc_feature (8)..(9): Xaa can be any amino acid
  misc_feature (11)..(11): Xaa can be any amino acid
  misc_feature (13)..(15): Xaa can be any amino acid
XXXXXXSXXEXLXXX

SEQ ID NO: 932 - protein, 15 aa, Artificial Sequence
  epitope
  misc_feature (1)..(2): Xaa can be any amino acid
  misc_feature (4)..(6): Xaa can be any amino acid
  misc_feature (8)..(9): Xaa can be any amino acid
  misc_feature (11)..(11): Xaa can be any amino acid
  misc_feature (13)..(15): Xaa can be any amino acid
XXGXXXSXXEXLXXX

SEQ ID NO: 933 - protein, 15 aa, Artificial Sequence
  epitope
GTGLIVSFGEMLIDF

SEQ ID NO: 934 - protein, 15 aa, Artificial Sequence
  epitope
DEFGHMLAGILKENG

SEQ ID NO: 935 - protein, 15 aa, Artificial Sequence
  epitope
SADMLLKPEELNLEL

SEQ ID NO: 936 - protein, 15 aa, Artificial Sequence
  epitope
DLIKVSDAELEFLTG

SEQ ID NO: 937 - protein, 15 aa, Artificial Sequence
  epitope
EFLTGSDKIDDESAL

SEQ ID NO: 938 - protein, 15 aa, Artificial Sequence
  epitope
VDDQSILEDEPRLRE

SEQ ID NO: 939 - protein, 15 aa, Artificial Sequence
  epitope
KGGAYTGEVSAEMLV

SEQ ID NO: 940 - protein, 15 aa, Artificial Sequence
  epitope
GGGKPSGELLELIER

SEQ ID NO: 941 - protein, 7 aa, Artificial Sequence
  epitope
  misc_feature (2)..(5): Xaa can be any amino acid
  misc_feature (7)..(7): Xaa can be any amino acid
KXXXXTX

SEQ ID NO: 942 - protein, 7 aa, Artificial Sequence
  epitope
  misc_feature (2)..(5): Xaa can be any amino acid
KXXXXTQ

SEQ ID NO: 943 - protein, 7 aa, Artificial Sequence
  epitope
KAAAATQ

SEQ ID NO: 944 - protein, 9 aa, Artificial Sequence
  epitope
  misc_feature (3)..(5): Xaa can be any amino acid
  misc_feature (8)..(9): Xaa can be any amino acid
TKXXXSDXX

SEQ ID NO: 945 - protein, 9 aa, Artificial Sequence
  epitope
  misc_feature (4)..(5): Xaa can be any amino acid
  misc_feature (8)..(9): Xaa can be any amino acid
TKDXXSDXX

SEQ ID NO: 946 - protein, 9 aa, Artificial Sequence
  epitope
TKDYASDAA

SEQ ID NO: 947 - protein, 8 aa, Artificial Sequence
  epitope
  misc_feature (4)..(6): Xaa can be any amino acid
VKDXXXDA

SEQ ID NO: 948 - protein, 8 aa, Artificial Sequence
  epitope
  misc_feature (5)..(6): Xaa can be any amino acid
VKDYXXDA

SEQ ID NO: 949 - protein, 8 aa, Artificial Sequence
  epitope
VKDYASDA

SEQ ID NO: 950 - protein, 9 aa, Artificial Sequence
  epitope
  misc_feature (3)..(8): Xaa can be any amino acid
KDXXXXXXQ

SEQ ID NO: 951 - protein, 9 aa, Artificial Sequence
  epitope
  misc_feature (3)..(7): Xaa can be any amino acid
KDXXXXXAQ

SEQ ID NO: 952 - protein, 9 aa, Artificial Sequence
  epitope
KDYASDTAQ

SEQ ID NO: 953 - protein, 15 aa, Artificial Sequence
  epitope
  misc_feature (1)..(7): Xaa can be any amino acid
  misc_feature (9)..(9): Xaa can be any amino acid
  misc_feature (11)..(11): Xaa can be any amino acid
  misc_feature (13)..(13): Xaa can be any amino acid
XXXXXXXEXYXLXHP

SEQ ID NO: 954 - protein, 15 aa, Artificial Sequence
  epitope
  misc_feature (1)..(6): Xaa can be any amino acid
XXXXXXIEAYLLAHP

SEQ ID NO: 955 - protein, 15 aa, Artificial Sequence
  epitope
DALFKAIEAYLLAHP

SEQ ID NO: 956 - protein, 9 aa, Artificial Sequence
  epitope
QKESEERKQ

SEQ ID NO: 957 - protein, 8 aa, Artificial Sequence
  epitope
SYRLQSGD

SEQ ID NO: 958 - protein, 9 aa, Artificial Sequence
  epitope
DALRVPSGT

SEQ ID NO: 959 - protein, 9 aa, Artificial Sequence
  epitope
RKTISSEDK

SEQ ID NO: 960 - protein, 15 aa, Artificial Sequence
  epitope
QHPEREPQQPGEKEE

SEQ ID NO: 961 - protein, 15 aa, Artificial Sequence
  epitope
GHQSQKGKHQQEEEN

SEQ ID NO: 962 - protein, 15 aa, Artificial Sequence
  epitope
LLNALPEEVIQHTFN

SEQ ID NO: 963 - protein, 15 aa, Artificial Sequence
  epitope
MRGRINYIRRNEGKD

SEQ ID NO: 964 - protein, 20 aa, Artificial Sequence
  epitope candidate
SSPRGKVEAEKARPMEETKV

SEQ ID NO: 965 - protein, 10 aa, Artificial Sequence
  epitope candidate
SSPRGKVEAE

SEQ ID NO: 966 - protein, 10 aa, Artificial Sequence
  epitope candidate
SPRGKVEAEK

SEQ ID NO: 967 - protein, 10 aa, Artificial Sequence
  epitope candidate
PRGKVEAEKA

SEQ ID NO: 968 - protein, 10 aa, Artificial Sequence
  epitope candidate
RGKVEAEKAR

SEQ ID NO: 969 - protein, 10 aa, Artificial Sequence
  epitope candidate
GKVEAEKARP

SEQ ID NO: 970 - protein, 10 aa, Artificial Sequence
  epitope candidate
KVEAEKARPM

SEQ ID NO: 971 - protein, 10 aa, Artificial Sequence
  epitope candidate
VEAEKARPME

SEQ ID NO: 972 - protein, 10 aa, Artificial Sequence
  epitope candidate
EAEKARPMEE

SEQ ID NO: 973 - protein, 10 aa, Artificial Sequence
  epitope candidate
AEKARPMEET

SEQ ID NO: 974 - protein, 10 aa, Artificial Sequence
  epitope candidate
EKARPMEETK

SEQ ID NO: 975 - protein, 10 aa, Artificial Sequence
  epitope candidate
KARPMEETKV

SEQ ID NO: 976 - protein, 8 aa, Artificial Sequence
  modified epitope
ARGKVEAE

SEQ ID NO: 977 - protein, 8 aa, Artificial Sequence
  modified epitope
PAGKVEAE

SEQ ID NO: 978 - protein, 8 aa, Artificial Sequence
  modified epitope
PRAKVEAE

SEQ ID NO: 979 - protein, 8 aa, Artificial Sequence
  modified epitope
PRGAVEAE

SEQ ID NO: 980 - protein, 8 aa, Artificial Sequence
  modified epitope
PRGKAEAE

SEQ ID NO: 981 - protein, 8 aa, Artificial Sequence
  modified epitope
PRGKVAAE

SEQ ID NO: 982 - protein, 8 aa, Artificial Sequence
  modified epitope
PRGKVEAE

SEQ ID NO: 983 - protein, 8 aa, Artificial Sequence
  modified epitope
PRGKVEAA

SEQ ID NO: 984 - protein, 15 aa, Artificial Sequence
  epitope
MLSKQMRRRLSADER

SEQ ID NO: 985 - protein, 14 aa, Artificial Sequence
  epitope
ASDHVPRRSKTSLR

1. A polypeptide specifically binding to an IgE antibody from an allergic patient, the polypeptide being any one of the following:
(1β) a polypeptide comprising at least one amino acid sequence selected from the group consisting of SEQ ID NOs: 650-660;
(2β) a polypeptide comprising at least one amino acid sequence selected from the group consisting of SEQ ID NOs: 661-692;
(4β) a polypeptide comprising at least one amino acid sequence selected from the group consisting of SEQ ID NOs: 717-731;
(5β) a polypeptide comprising at least one amino acid sequence selected from the group consisting of SEQ ID NOs: 732-738;
(6β) a polypeptide comprising at least one amino acid sequence selected from the group consisting of SEQ ID NOs: 739 and 740;
(7β) a polypeptide comprising at least one amino acid sequence selected from the group consisting of SEQ ID NOs: 741-744;
(9β) a polypeptide comprising at least one amino acid sequence selected from the group consisting of SEQ ID NOs: 745-749;
(11β) a polypeptide comprising at least one amino acid sequence selected from the group consisting of SEQ ID NOs: 751-754;
(12β) a polypeptide comprising the amino acid sequence of SEQ ID NO: 755;
(13β) a polypeptide comprising at least one amino acid sequence selected from the group consisting of SEQ ID NOs: 756-758;
(14β) a polypeptide comprising at least one amino acid sequence selected from the group consisting of SEQ ID NOs: 759-764;
(15β) a polypeptide comprising at least one amino acid sequence selected from the group consisting of SEQ ID NOs: 765 and 766;
(17β) a polypeptide comprising the amino acid sequence of SEQ ID NO: 767;
(18β) a polypeptide comprising at least one amino acid sequence selected from the group consisting of SEQ ID NOs: 750 and 768-775;
(19β) a polypeptide comprising at least one amino acid sequence selected from the group consisting of SEQ ID NOs: 776-787;
(25β) a polypeptide comprising at least one amino acid sequence selected from the group consisting of SEQ ID NOs: 814 and 815;
(26β) a polypeptide comprising at least one amino acid sequence selected from the group consisting of SEQ ID NOs: 816-819;
(27β) a polypeptide comprising the amino acid sequence of SEQ ID NO: 820;
(28β) a polypeptide comprising at least one amino acid sequence selected from the group consisting of SEQ ID NOs: 821-835;
(29β) a polypeptide comprising at least one amino acid sequence selected from the group consisting of SEQ ID NOs: 836-839;
(34β) a polypeptide comprising at least one amino acid sequence selected from the group consisting of SEQ ID NOs: 840-846;
(35β) a polypeptide comprising at least one amino acid sequence selected from the group consisting of SEQ ID NOs: 847-856;
(36β) a polypeptide comprising at least one amino acid sequence selected from the group consisting of SEQ ID NOs: 857-861;
(38β) a polypeptide comprising at least one amino acid sequence selected from the group consisting of SEQ ID NOs: 862-892;
(39β) a polypeptide comprising at least one amino acid sequence selected from the group consisting of SEQ ID NOs: 893-895;
(40β) a polypeptide comprising at least one amino acid sequence selected from the group consisting of SEQ ID NOs: 896-902;
(41β) a polypeptide comprising the amino acid sequence of SEQ ID NO: 903;
(42β) a polypeptide comprising at least one amino acid sequence selected from the group consisting of SEQ ID NOs: 904-906;
(45β) a polypeptide comprising at least one amino acid sequence selected from the group consisting of SEQ ID NOs: 910-912;
(46β) a polypeptide comprising at least one amino acid sequence selected from the group consisting of SEQ ID NOs: 913-915;
(47β) a polypeptide comprising at least one amino acid sequence selected from the group consisting of SEQ ID NOs: 916-918;
(48β) a polypeptide comprising at least one amino acid sequence selected from the group consisting of SEQ ID NOs: 919-922;
(50β) a polypeptide comprising at least one amino acid sequence selected from the group consisting of SEQ ID NOs: 924-927;
(51β) a polypeptide comprising at least one amino acid sequence selected from the group consisting of SEQ ID NOs: 928-930;
(52β) a polypeptide comprising at least one amino acid sequence selected from the group consisting of SEQ ID NOs: 931-938;
(53β) a polypeptide comprising the amino acid sequence of SEQ ID NO: 939;
(54β) a polypeptide comprising at least one amino acid sequence selected from the group consisting of SEQ ID NOs: 940-943; and
(55β) a polypeptide comprising at least one amino acid sequence selected from the group consisting of SEQ ID NOs: 944-952.

2. A polypeptide specifically binding to an IgE antibody from an allergic patient, the polypeptide being any one of the following:
(3β) a polypeptide comprising at least one amino acid sequence selected from the group consisting of SEQ ID NOs: 693-716;
(20β) a polypeptide comprising at least one amino acid sequence selected from the group consisting of SEQ ID NOs: 788-792;
(21β) a polypeptide comprising at least one amino acid sequence selected from the group consisting of SEQ ID NOs: 793-802;
(22β) a polypeptide comprising at least one amino acid sequence selected from the group consisting of SEQ ID NOs: 803-808;
(23β) a polypeptide comprising at least one amino acid sequence selected from the group consisting of SEQ ID NOs: 809-812;
(24β) a polypeptide comprising the amino acid sequence of SEQ ID NO: 813;
(44β) a polypeptide comprising at least one amino acid sequence selected from the group consisting of SEQ ID NOs: 907-909;
(49β) a polypeptide comprising the amino acid sequence of SEQ ID NO: 923;
(57β) a polypeptide comprising at least one amino acid sequence selected from the group consisting of SEQ ID NOs: 953-955;
(58β) a polypeptide comprising at least one amino acid sequence selected from the group consisting of SEQ ID NOs: 956-960;
(59β) a polypeptide comprising at least one amino acid sequence selected from the group consisting of SEQ ID NOs: 961 and 962; and
(60β) a polypeptide comprising the amino acid sequence of SEQ ID NO: 963.

3. The polypeptide according to claim 1, wherein the number of amino acid residues is 500 or less.

4. A kit for diagnosing an allergy, comprising at least one of polypeptides according to claim 1.

5. A composition for diagnosing an allergy, the composition comprising at least one of polypeptides according to claim 1, as an antigen.

6. A method for providing an indicator for diagnosing an allergy in a subject, the method comprising the steps of:
(i) contacting a sample obtained from the subject with an antigen, wherein the sample is a solution comprising an Ig antibody;
(ii) detecting binding between the IgE antibody present in the sample obtained from the subject and the antigen; and
(iii) when the binding between the IgE antibody in the subject and the antigen is detected, an indicator of the fact that the subject is allergic is provided;
wherein the antigen is at least one of polypeptides according to claim 1,

7. A pharmaceutical composition comprising at least one of polypeptides according to claim 1.

8. The pharmaceutical composition according to claim 7, wherein the pharmaceutical composition is intended for the treatment of an allergy.

9. A tester for determining the presence or absence of an antigen in an object of interest, the tester comprising an antibody that binds to at least one of polypeptides according to claim 1.

10. A food raw material or an edible processed product in which an antigen is eliminated or reduced, or a polypeptide is cleaved or removed, wherein the antigen is at least one of polypeptides according to claim 1.

11. A method for producing an edible processed product in which an antigen is eliminated or reduced, or a polypeptide is cleaved or removed, the method comprising the step of confirming that the antigen is eliminated or reduced, or the polypeptide is cleaved or removed, in a production process of the processed product, wherein the antigen is at least one of polypeptides according to claim 1.

12. The polypeptide according to claim 2, wherein the number of amino acid residues is 500 or less.

13. A kit for diagnosing an allergy, comprising at least one of polypeptides according to claim 2.

14. A composition for diagnosing an allergy, the composition comprising at least one of polypeptides according to claim 2 as an antigen.

15. A method for providing an indicator for diagnosing an allergy in a subject, the method comprising the steps of:
(i) contacting a sample obtained from the subject with an antigen, wherein the sample is a solution comprising an Ig antibody;
(ii) detecting binding between the IgE antibody present in the sample obtained from the subject and the antigen; and
(iii) when the binding between the IgE antibody in the subject and the antigen is detected, an indicator of the fact that the subject is allergic is provided;
wherein the antigen is at least one of polypeptides according to claim 2.

16. A pharmaceutical composition comprising at least one of polypeptides according to claim 2.

17. The pharmaceutical composition according to claim 16, wherein the pharmaceutical composition is intended for the treatment of an allergy.

18. A tester for determining the presence or absence of an antigen in an object of interest, the tester comprising an antibody that binds to at least one of polypeptides according to claim 2.

19. A food raw material or an edible processed product in which an antigen is eliminated or reduced, or a polypeptide is cleaved or removed, wherein the antigen is at least one of polypeptides according to claim 2

20. A method for producing an edible processed product in which an antigen is eliminated or reduced, or a polypeptide is cleaved or removed, the method comprising the step of confirming that the antigen is eliminated or reduced, or the polypeptide is cleaved or removed, in a production process of the processed product, wherein the antigen is at least one of polypeptides according to claim 2.
